(19) United States
(12) Patent Application Publication
(10) Pub. No.: US 2005/0209180 A1
(43) Pub. Date: Sep. 22, 2005

(54) RNA interference mediated inhibition of hepatitis C virus (HCV) expression using short interfering nucleic acid (siNA)

(75) Inventors: Vasant Jadhav, Boulder, CO (US); Karl Kossen, Westminster, CO (US); Shawn Zinnen, Denver, CO (US); Narendra Vaish, Denver, CO (US); James McSwiggen, Boulder, CO (US)

Correspondence Address: MCDONNELL BOEHNEN HULBERT & BERGHOFF LLP, 300 S. WACKER DRIVE, 32ND FLOOR, CHICAGO, IL, 60606, US

(73) Assignee: Sirna Therapeutics, Inc., Boulder, CO (US)

(21) Appl. No.: 10/942,560

(22) Filed: Sep. 15, 2004

Related U.S. Application Data
(63) Continuation-in-part of application No. 10/667,271, filed on Sep. 16, 2003.
Application No. 10/667,271 is a continuation-in-part of application No. PCT/US03/05043, filed on Feb. 20, 2003.
Application No. 10/667,271 is a continuation-in-part of application No. PCT/US02/09187, filed on Mar. 26, 2002.
(63) Continuation-in-part of application No. PCT/US04/16390, filed on May 24, 2004.
Application No. PCT/US04/16390 is a continuation-in-part of application No. 10/826,966, filed on Apr. 16, 2004.
Application No. 10/826,966 is a continuation-in-part of application No. 10/757,803, filed on Jan. 14, 2004.
Application No. 10/757,803 is a continuation-in-part of application No. 10/720,448, filed on Nov. 24, 2003.
Application No. 10/720,448 is a continuation-in-part of application No. 10/693,059, filed on Oct. 23, 2003.
Application No. 10/693,059 is a continuation-in-part of application No. 10/444,853, filed on May 23, 2003.
Application No. 10/444,853 is a continuation-in-part of application No. PCT/US03/05346, filed on Feb. 20, 2003.
Application No. 10/444,853 is a continuation-in-part of application No. PCT/US03/05028, filed on Feb. 20, 2003.
(63) Continuation-in-part of application No. PCT/US04/13456, filed on Apr. 30, 2004.
Application No. PCT/US04/13456 is a continuation-in-part of application No. 10/780,447, filed on Feb. 13, 2004.
Application No. 10/780,447 is a continuation-in-part of application No. 10/427,160, filed on Apr. 30, 2003.
Application No. 10/427,160 is a continuation-in-part of application No. PCT/US02/15876, filed on May 17, 2002.
(63) Continuation-in-part of application No. 10/727,780, filed on Dec. 3, 2003.
(60) Provisional application No. 60/401,104, filed on Aug. 5, 2002.
(60) Provisional application No. 60/358,580, filed on Feb. 20, 2002.
(60) Provisional application No. 60/358,580, filed on Feb. 20, 2002.
(60) Provisional application No. 60/363,124, filed on Mar. 11, 2002.
(60) Provisional application No. 60/363,124, filed on Mar. 11, 2002.
(60) Provisional application No. 60/386,782, filed on Jun. 6, 2002.
(60) Provisional application No. 60/386,782, filed on Jun. 6, 2002.
(60) Provisional application No. 60/406,784, filed on Aug. 29, 2002.
(60) Provisional application No. 60/406,784, filed on Aug. 29, 2002.
(60) Provisional application No. 60/408,378, filed on Sep. 5, 2002.
(60) Provisional application No. 60/408,378, filed on Sep. 5, 2002.
(60) Provisional application No. 60/409,293, filed on Sep. 9, 2002.
(60) Provisional application No. 60/409,293, filed on Sep. 9, 2002.
(60) Provisional application No. 60/440,129, filed on Jan. 15, 2003.
(60) Provisional application No. 60/440,129, filed on Jan. 15, 2003.
(60) Provisional application No. 60/292,217, filed on May 18, 2001.
(60) Provisional application No. 60/362,016, filed on Mar. 6, 2002.
(60) Provisional application No. 60/306,883, filed on Jul. 20, 2001.
(60) Provisional application No. 60/311,865, filed on Aug. 13, 2001.
(60) Provisional application No. 60/543,480, filed on Feb. 10, 2004.

(51) Int. Cl. A61K 48/00; C07H 21/02

(52) U.S. Cl. 514/44; 536/23.1

(57) ABSTRACT

This invention relates to compounds, compositions, and methods useful for modulating HCV gene expression using short interfering nucleic acid (siNA) molecules. This invention also relates to compounds, compositions, and methods useful for modulating the expression and activity of other genes involved in pathways of HCV gene expression and/or activity by RNA interference (RNAi) using small nucleic acid molecules. In particular, the instant invention features small nucleic acid molecules, such as short interfering nucleic acid (siNA), short interfering RNA (siRNA), double-stranded RNA (dsRNA), micro-RNA (miRNA), and short hairpin RNA (shRNA) molecules and methods used to modulate the expression of HCV genes.

[0001] This invention is a continuation-in-part of U.S. patent application Ser. No. 10/667,271, filed Sep. 16, 2003, which is a continuation-in-part of International Patent Application No. PCT/US03/05043, filed Feb. 20, 2003, which is a continuation-in-part of McSwiggen PCT/US02/09187, filed Mar. 26, 2002 and claims the benefit of McSwiggen U.S. Ser. No. 60/401,104, filed Aug. 5, 2002. This application is also a continuation-in-part of International Patent Application No. PCT/US04/16390, filed May 24, 2004, which is a continuation-in-part of U.S. patent application Ser. No. 10/826,966, filed Apr. 16, 2004, which is continuation-in-part of U.S. patent application Ser. No. 10/757,803, filed Jan. 14, 2004, which is a continuation-in-part of U.S. patent application Ser. No. 10/720,448, filed Nov. 24, 2003, which is a continuation-in-part of U.S. patent application Ser. No. 10/693,059, filed Oct. 23, 2003, which is a continuation-in-part of U.S. patent application Ser. No. 10/444,853, filed May 23, 2003, which is a continuation-in-part of International Patent Application No. PCT/US03/05346, filed Feb. 20, 2003, and a continuation-in-part of International Patent Application No. PCT/US03/05028, filed Feb. 20, 2003, both of which claim the benefit of U.S. Provisional Application No. 60/358,580 filed Feb. 20, 2002, U.S. Provisional Application No. 60/363,124 filed Mar. 11, 2002, U.S. Provisional Application No. 60/386,782 filed Jun. 6, 2002, U.S. Provisional Application No. 60/406,784 filed Aug. 29, 2002, U.S. Provisional Application No. 60/408,378 filed Sep. 5, 2002, U.S. Provisional Application No. 60/409,293 filed Sep. 9, 2002, and U.S. Provisional Application No. 60/440,129 filed Jan. 15, 2003. This application is also a continuation-in-part of International Patent Application No. PCT/US04/13456, filed Apr. 30, 2004, which is a continuation-in-part of U.S. patent application Ser. No. 10/780,447, filed Feb. 13, 2004, which is a continuation-in-part of U.S. patent application Ser. No. 10/427,160, filed Apr. 30, 2003, which is a continuation-in-part of International Patent Application No. PCT/US02/15876 filed May 17, 2002, which claims the benefit of U.S. Provisional Application No. 60/292,217, filed May 18, 2001, U.S. Provisional Application No. 60/362,016, filed Mar. 6, 2002, U.S. Provisional Application No. 60/306,883, filed Jul. 20, 2001, and U.S. Provisional Application No. 60/311,865, filed Aug. 13, 2001. This application is also a continuation-in-part of U.S. patent application Ser. No. 10/727,780 filed Dec. 3, 2003. This application also claims the benefit of U.S. Provisional Application No. 60/543,480, filed Feb. 10, 2004. The instant application claims the benefit of all the listed applications, which are hereby incorporated by reference herein in their entireties, including the drawings.

### FIELD OF THE INVENTION

[0002] The present invention relates to compounds, compositions, and methods for the study, diagnosis, and treatment of traits, diseases and conditions that respond to the modulation of hepatitis C virus (HCV) gene expression and/or activity. The present invention is also directed to compounds, compositions, and methods relating to traits, diseases and conditions that respond to the modulation of expression and/or activity of genes involved in hepatitis C virus (HCV) gene expression pathways or other cellular processes that mediate the maintenance or development of such traits, diseases and conditions. Specifically, the invention relates to small nucleic acid molecules, such as short interfering nucleic acid (siNA), short interfering RNA (siRNA), double-stranded RNA (dsRNA), micro-RNA (miRNA), and short hairpin RNA (shRNA) molecules capable of mediating RNA interference (RNAi) against hepatitis C virus (HCV) gene expression. Such small nucleic acid molecules are useful, for example, in providing compositions to prevent, inhibit, or reduce HCV infection, liver failure, hepatocellular carcinoma, cirrhosis, and/or other disease states associated with HCV infection in a subject or organism.

### BACKGROUND OF THE INVENTION

[0003] The following is a discussion of relevant art pertaining to RNAi. The discussion is provided only for understanding of the invention that follows. The summary is not an admission that any of the work described below is prior art to the claimed invention.

[0004] RNA interference refers to the process of sequence-specific post-transcriptional gene silencing in animals mediated by short interfering RNAs (siRNAs) (Zamore et al., 2000, Cell, 101, 25-33; Fire et al., 1998, Nature, 391, 806; Hamilton et al., 1999, Science, 286, 950-951; Lin et al., 1999, Nature, 402, 128-129; Sharp, 1999, Genes & Dev., 13:139-141; and Strauss, 1999, Science, 286, 886). The corresponding process in plants (Heifetz et al., International PCT Publication No. WO 99/61631) is commonly referred to as post-transcriptional gene silencing or RNA silencing and is also referred to as quelling in fungi. The process of post-transcriptional gene silencing is thought to be an evolutionarily-conserved cellular defense mechanism used to prevent the expression of foreign genes and is commonly shared by diverse flora and phyla (Fire et al., 1999, Trends Genet., 15, 358). Such protection from foreign gene expression may have evolved in response to the production of double-stranded RNAs (dsRNAs) derived from viral infection or from the random integration of transposon elements into a host genome via a cellular response that specifically destroys homologous single-stranded RNA or viral genomic RNA. The presence of dsRNA in cells triggers the RNAi response through a mechanism that has yet to be fully characterized. This mechanism appears to be different from other known mechanisms involving double stranded RNA-specific ribonucleases, such as the interferon response that results from dsRNA-mediated activation of protein kinase PKR and 2′,5′-oligoadenylate synthetase resulting in non-specific cleavage of mRNA by ribonuclease L (see for example U.S. Pat. Nos. 6,107,094; 5,898,031; Clemens et al., 1997, J. Interferon & Cytokine Res., 17, 503-524; Adah et al., 2001, Curr. Med. Chem., 8, 1189).

[0005] The presence of long dsRNAs in cells stimulates the activity of a ribonuclease III enzyme referred to as dicer (Bass, 2000, Cell, 101, 235; Zamore et al., 2000, Cell, 101, 25-33; Hammond et al., 2000, Nature, 404, 293). Dicer is involved in the processing of the dsRNA into short pieces of dsRNA known as short interfering RNAs (siRNAs) (Zamore et al., 2000, Cell, 101, 25-33; Bass, 2000, Cell, 101, 235; Berstein et al., 2001, Nature, 409, 363). Short interfering RNAs derived from dicer activity are typically about 21 to about 23 nucleotides in length and comprise about 19 base pair duplexes (Zamore et al., 2000, Cell, 101, 25-33; Elbashir et al., 2001, Genes Dev., 15, 188). Dicer has also been implicated in the excision of 21- and 22-nucleotide small temporal RNAs (stRNAs) from precursor RNA of conserved structure that are implicated in translational control (Hutvagner et al., 2001, Science, 293, 834). The RNAi response also features an endonuclease complex, commonly referred to as an RNA-induced silencing complex (RISC), which mediates cleavage of single-stranded RNA having sequence complementary to the antisense strand of the siRNA duplex. Cleavage of the target RNA takes place in the middle of the region complementary to the antisense strand of the siRNA duplex (Elbashir et al., 2001, Genes Dev., 15, 188).

[0006] RNAi has been studied in a variety of systems. Fire et al., 1998, Nature, 391, 806, were the first to observe RNAi in C. elegans. Bahramian and Zarbl, 1999, Molecular and Cellular Biology, 19, 274-283 and Wianny and Goetz, 1999, Nature Cell Biol., 2, 70, describe RNAi mediated by dsRNA in mammalian systems. Hammond et al., 2000, Nature, 404, 293, describe RNAi in Drosophila cells transfected with dsRNA. Elbashir et al., 2001, Nature, 411, 494 and Tuschl et al., International PCT Publication No. WO 01/75164, describe RNAi induced by introduction of duplexes of synthetic 21-nucleotide RNAs in cultured mammalian cells including human embryonic kidney and HeLa cells. Recent work in Drosophila embryonic lysates (Elbashir et al., 2001, EMBO J, 20, 6877 and Tuschl et al., International PCT Publication No. WO 01/75164) has revealed certain requirements for siRNA length, structure, chemical composition, and sequence that are essential to mediate efficient RNAi activity. These studies have shown that 21-nucleotide siRNA duplexes are most active when containing 3′-terminal dinucleotide overhangs. Furthermore, complete substitution of one or both siRNA strands with 2′-deoxy (2′-H) or 2′-O-methyl nucleotides abolishes RNAi activity, whereas substitution of the 3′-terminal siRNA overhang nucleotides with 2′-deoxy nucleotides (2′-H) was shown to be tolerated. Single mismatch sequences in the center of the siRNA duplex were also shown to abolish RNAi activity. In addition, these studies also indicate that the position of the cleavage site in the target RNA is defined by the 5′-end of the siRNA guide sequence rather than the 3′-end of the guide sequence (Elbashir et al., 2001, EMBO J., 20, 6877). Other studies have indicated that a 5′-phosphate on the target-complementary strand of a siRNA duplex is required for siRNA activity and that ATP is utilized to maintain the 5′-phosphate moiety on the siRNA (Nykanen et al., 2001, Cell, 107, 309).

[0007] Studies have shown that replacing the 3′-terminal nucleotide overhanging segments of a 21-mer siRNA duplex having two-nucleotide 3′-overhangs with deoxyribonucleotides does not have an adverse effect on RNAi activity. Replacing up to four nucleotides on each end of the siRNA with deoxyribonucleotides has been reported to be well tolerated, whereas complete substitution with deoxyribonucleotides results in no RNAi activity (Elbashir et al., 2001, EMBO J., 20, 6877 and Tuschl et al., International PCT Publication No. WO 01/75164). In addition, Elbashir et al., supra, also report that substitution of siRNA with 2′-O-methyl nucleotides completely abolishes RNAi activity. Li et al., International PCT Publication No. WO 00/44914, and Beach et al., International PCT Publication No. WO 01/68836 preliminarily suggest that siRNA may include modifications to either the phosphate-sugar backbone or the nucleoside to include at least one of a nitrogen or sulfur heteroatom, however, neither application postulates to what extent such modifications would be tolerated in siRNA molecules, nor provides any further guidance or examples of such modified siRNA. Kreutzer et al., Canadian Patent Application No. 2,359,180, also describe certain chemical modifications for use in dsRNA constructs in order to counteract activation of double-stranded RNA-dependent protein kinase PKR, specifically 2′-amino or 2′-O-methyl nucleotides, and nucleotides containing a 2′-O or 4′-C methylene bridge. However, Kreutzer et al. similarly fails to provide examples or guidance as to what extent these modifications would be tolerated in dsRNA molecules.

[0008] Parrish et al., 2000, Molecular Cell, 6, 1077-1087, tested certain chemical modifications targeting the unc-22 gene in C. elegans using long (>25 nt) siRNA transcripts. The authors describe the introduction of thiophosphate residues into these siRNA transcripts by incorporating thiophosphate nucleotide analogs with T7 and T3 RNA polymerase and observed that RNAs with two phosphorothioate modified bases also had substantial decreases in effectiveness as RNAi. Further, Parrish et al. reported that phosphorothioate modification of more than two residues greatly destabilized the RNAs in vitro such that interference activities could not be assayed. Id. at 1081. The authors also tested certain modifications at the 2′-position of the nucleotide sugar in the long siRNA transcripts and found that substituting deoxynucleotides for ribonucleotides produced a substantial decrease in interference activity, especially in the case of Uridine to Thymidine and/or Cytidine to deoxy-Cytidine substitutions. Id. In addition, the authors tested certain base modifications, including substituting, in sense and antisense strands of the siRNA, 4-thiouracil, 5-bromouracil, 5-iodouracil, and 3-(aminoallyl)uracil for uracil, and inosine for guanosine. Whereas 4-thiouracil and 5-bromouracil substitution appeared to be tolerated, Parrish reported that inosine produced a substantial decrease in interference activity when incorporated in either strand. Parrish also reported that incorporation of 5-iodouracil and 3-(aminoallyl)uracil in the antisense strand resulted in a substantial decrease in RNAi activity as well.

[0009] The use of longer dsRNA has been described. For example, Beach et al., International PCT Publication No. WO 01/68836, describes specific methods for attenuating gene expression using endogenously-derived dsRNA. Tuschl et al., International PCT Publication No. WO 01/75164, describe a Drosophila in vitro RNAi system and the use of specific siRNA molecules for certain functional genomic and certain therapeutic applications; although Tuschl, 2001, Chem. Biochem., 2, 239-245, doubts that RNAi can be used to cure genetic diseases or viral infection due to the danger of activating interferon response. Li et al., International PCT Publication No. WO 00/44914, describe the use of specific long (141 bp488 bp) enzymatically synthesized or vector expressed dsRNAs for attenuating the expression of certain target genes. Zernicka-Goetz et al., International PCT Publication No. WO 01/36646, describe certain methods for inhibiting the expression of particular genes in mammalian cells using certain long (550 bp-714 bp), enzymatically synthesized or vector expressed dsRNA molecules. Fire et al., International PCT Publication No. WO 99/32619, describe particular methods for introducing certain long dsRNA molecules into cells for use in inhibiting gene expression in nematodes. Plaetinck et al., International PCT Publication No. WO 00/01846, describe certain methods for identifying specific genes responsible for conferring a particular phenotype in a cell using specific long dsRNA molecules. Mello et al., International PCT Publication No. WO 01/29058, describe the identification of specific genes involved in dsRNA-mediated RNAi. Pachuck et al., International PCT Publication No. WO 00/63364, describe certain long (at least 200 nucleotide) dsRNA constructs. Deschamps Depaillette et al., International PCT Publication No. WO 99/07409, describe specific compositions consisting of particular dsRNA molecules combined with certain anti-viral agents. Waterhouse et al., International PCT Publication No. 99/53050 and 1998, PNAS, 95, 13959-13964, describe certain methods for decreasing the phenotypic expression of a nucleic acid in plant cells using certain dsRNAs. Driscoll et al., International PCT Publication No. WO 01/49844, describe specific DNA expression constructs for use in facilitating gene silencing in targeted organisms.

[0010] Others have reported on various RNAi and gene-silencing systems. For example, Parrish et al., 2000, Molecular Cell, 6, 1077-1087, describe specific chemically-modified dsRNA constructs targeting the unc-22 gene of C. elegans. Grossniklaus, International PCT Publication No. WO 01/38551, describes certain methods for regulating polycomb gene expression in plants using certain dsRNAs. Churikov et al., International PCT Publication No. WO 01/42443, describe certain methods for modifying genetic characteristics of an organism using certain dsRNAs. Cogoni et al,, International PCT Publication No. WO 01/53475, describe certain methods for isolating a Neurospora silencing gene and uses thereof. Reed et al., International PCT Publication No. WO 01/68836, describe certain methods for gene silencing in plants. Honer et al., International PCT Publication No. WO 01/70944, describe certain methods of drug screening using transgenic nematodes as Parkinson's Disease models using certain dsRNAs. Deak et al., International PCT Publication No. WO 01/72774, describe certain Drosophila-derived gene products that may be related to RNAi in Drosophila. Arndt et al., International PCT Publication No. WO 01/92513 describe certain methods for mediating gene suppression by using factors that enhance RNAi. Tuschl et al., International PCT Publication No. WO 02/44321, describe certain synthetic siRNA constructs. Pachuk et al., International PCT Publication No. WO 00/63364, and Satishchandran et al., International PCT Publication No. WO 01/04313, describe certain methods and compositions for inhibiting the function of certain polynucleotide sequences using certain long (over 250 bp), vector expressed dsRNAs. Echeverri et al., International PCT Publication No. WO 02/38805, describe certain C. elegans genes identified via RNAi. Kreutzer et al., International PCT Publications Nos. WO 02/055692, WO 02/055693, and EP 1144623 B1 describes certain methods for inhibiting gene expression using dsRNA. Graham et al., International PCT Publications Nos. WO 99/49029 and WO 01/70949, and AU 4037501 describe certain vector expressed siRNA molecules. Fire et al., U.S. Pat. No. 6,506,559, describe certain methods for inhibiting gene expression in vitro using certain long dsRNA (299 bp-1033 bp) constructs that mediate RNAi. Martinez et al., 2002, Cell, 110, 563-574, describe certain single stranded siRNA constructs, including certain 5′-phosphorylated single stranded siRNAs that mediate RNA interference in Hela cells. Harborth et al., 2003, Antisense & Nucleic Acid Drug Development, 13, 83-105, describe certain chemically and structurally modified siRNA molecules. Chiu and Rana, 2003, RNA, 9, 1034-1048, describe certain chemically and structurally modified siRNA molecules. Woolf et al., International PCT Publication Nos. WO 03/064626 and WO 03/064625 describe certain chemically modified dsRNA constructs.

[0011] McCaffrey et al., 2002, Nature, 418, 38-39, describes the use of certain siRNA constructs targeting a chimeric HCV NS5B protein/luciferase transcript in mice.

[0012] Randall et al., 2003, PNAS USA, 100, 235-240, describe certain siRNA constructs targeting HCV RNA in Huh7 hepatoma cell lines.

### SUMMARY OF THE INVENTION

[0013] This invention relates to compounds, compositions, and methods useful for modulating the expression of genes, such as those genes associated with the development or maintenance of HCV infection, liver failure, hepatocellular carcinoma, cirrhosis, and/or other disease states associated with HCV infection, by RNA interference (RNAi) using short interfering nucleic acid (siNA) molecules. This invention also relates to compounds, compositions, and methods useful for modulating the expression and activity of other genes involved in pathways of HCV gene expression and/or activity by RNA interference (RNAi) using small nucleic acid molecules. In particular, the instant invention features small nucleic acid molecules, such as short interfering nucleic acid (siNA), short interfering RNA (siRNA), double-stranded RNA (dsRNA), micro-RNA (miRNA), and short hairpin RNA (shRNA) molecules and methods used to modulate the expression of HCV genes and/or other genes (e.g., cellular or host genes) involved in pathways of HCV gene expression and/or infection.

[0014] A siNA of the invention can be unmodified or chemically-modified. A siNA of the instant invention can be chemically synthesized, expressed from a vector or enzymatically synthesized. The instant invention also features various chemically-modified synthetic short interfering nucleic acid (siNA) molecules capable of modulating HCV gene expression or activity in cells by RNA interference (RNAi). The use of chemically-modified siNA improves various properties of native siNA molecules through increased resistance to nuclease degradation in vivo and/or through improved cellular uptake. Further, contrary to earlier published studies, siNA having multiple chemical modifications retains its RNAi activity. The siNA molecules of the instant invention provide useful reagents and methods for a variety of therapeutic, veterinary, diagnostic, target validation, genomic discovery, genetic engineering, and pharmacogenomic applications.

[0015] In one embodiment, the invention features one or more siNA molecules and methods that independently or in combination modulate the expression of gene(s) encoding HCV and/or cellular proteins associated with the maintenance or development of HCV infection, liver failure, hepatocellular carcinoma, and cirrhosis, such as genes encoding sequences comprising those sequences referred to by GenBank Accession Nos. shown in Table I, referred to herein generally as HCV. The description below of the various aspects and embodiments of the invention is provided with reference to exemplary hepatitis C virus (HCV) genes, generally referred to herein as HCV. However, such reference is meant to be exemplary only and the various aspects and embodiments of the invention are also directed to other genes that express alternate HCV genes, such as mutant HCV genes, splice variants of HCV genes, and genes encoding different strains of HCV, as well as as cellular targets for HCV, such as those described herein. The various aspects and embodiments are also directed to other genes involved in HCV pathways, including genes that encode cellular proteins involved in the maintenance and/or development of HCV infection, liver failure, hepatocellular carcinoma, and cirrhosis or other genes that express other proteins associated with HCV infection, such as cellular proteins that are utilized in the HCV life-cycle. Such additional genes can be analyzed for target sites using the methods described herein for HCV. Thus, the inhibition and the effects of such inhibition of the other genes can be performed as described herein. In other words, the term “HCV” as it is defined herein below and recited in the described embodiments, is meant to encompass genes associated with the development and/or maintenance of HCV infection, such as genes which encode HCV polypeptides, including polypeptides of different strains of HCV, mutant HCV genes, and splice variants of HCV genes, as well as cellular genes involved in HCV pathways of gene expression, replication, and/or HCV activity. Also, the term “HCV” as it is defined herein below and recited in the described embodiments, is meant to encompass HCV viral gene products and cellular gene products involved in HCV infection, such as those described herein. Thus, each of the embodiments described herein with reference to the term “HCV” are applicable to all of the virus, cellular and viral protein, peptide, polypeptide, and/or polynucleotide molecules covered by the term “HCV”, as that term is defined herein.

[0016] In one embodiment, the invention features siNA molecules having RNAi specificity for the HCV minus strand, for example, Genbank Accession No. HPCK1S1, Hepatitis C virus (strain HCV-1b, clone HCV-K1-S1), complete genome; Genbank Accession No. D50483, 9410 nt.

[0017] In one embodiment, the invention features one or more siNA molecules and methods that independently or in combination modulate the expression of genes representing cellular targets for HCV infection, such as cellular receptors, cell surface molecules, cellular enzymes, cellular transcription factors, and/or cytokines, second messengers, and cellular accessory molecules including, but not limited to, La antigen (see for example Costa-Mattioli et al., 2004, Mol Cell Biol., 24, 6861-70, e.g., Genbank Accession No. NM_{—}003142); FAS (e.g., Genbank Accession No. NM_{—}000043) or FAS ligand (e.g., Genbank Accession No. NM_{—}000639); interferon regulatory factors (IRFs; e.g., Genbank Accession No. AF082503.1); cellular PKR protein kinase (e.g., Genbank Accession No. XM_{—}002661.7); human eukaryotic initiation factors 2B (elF2Bgamma; e.g., Genbank Accession No. AF256223, and/or elF2gamma; e.g., Genbank Accession No. NM_{—}006874.1); human DEAD Box protein (DDX3; e.g., Genbank Accession No. XM_{—}018021.2); and cellular proteins that bind to the poly(U) tract of the HCV 3′-UTR, such as polypyrimidine tract-binding protein (e.g., Genbank Accession Nos. NM_{—}031991.1 and XM_{—}042972.3). Such cellular targets are also referred to herein generally as HCV targets, and specifically as “host target” or “host targets”.

[0018] Due to the high sequence variability of the HCV genome, selection of siNA molecules for broad therapeutic applications likely involve the conserved regions of the HCV genome. In one embodiment, the present invention relates to siNA molecules that target the conserved regions of the HCV genome. Examples of conserved regions of the HCV genome include, but are not limited to, the 5′-Non Coding Region (NCR, also referred to as the 5′-untranslated region, UTR), the 5′-end of the core protein coding region, and the 3′-NCR. HCV genomic RNA contains an internal ribosome entry site (IRES) in the 5′-NCR which mediates translation independently of a 5′-cap structure (Wang et al., 1993, J. Virol., 67, 3338-44). The full-length sequence of the HCV RNA genome is heterologous among clinically isolated subtypes, of which there are at least fifteen (Simmonds, 1995, Hepatology, 21, 570-583), however, the 5′-NCR sequence of HCV is highly conserved across all known subtypes, most likely to preserve the shared IRES mechanism (Okamoto et al., 1991, J. General Virol., 72, 2697-2704). Therefore, a siNA molecule can be designed to target the different isolates of HCV by targeting a conserved region, such as the 5′ NCR sequence. siNA molecules designed to target conserved regions of various HCV isolates enable efficient inhibition of HCV replication in diverse patient populations and ensure the effectiveness of the siNA molecules against HCV quasi species which evolve due to mutations in the non-conserved regions of the HCV genome. As described, a single siNA molecule can be targeted against all isolates of HCV by designing the siNA molecule to interact with conserved nucleotide sequences of HCV (e.g., sequences that are expected to be present in the RNA of various HCV isolates).

[0019] In one embodiment, the invention features a double-stranded short interfering nucleic acid (siNA) molecule that down-regulates expression of a HCV gene or that directs cleavage of a HCV RNA, wherein said siNA molecule comprises about 15 to about 28 base pairs.

[0020] In one embodiment, the invention features a double stranded short interfering nucleic acid (siNA) molecule that directs cleavage of a HCV RNA via RNA interference (RNAi), wherein the double stranded siNA molecule comprises a first and a second strand, each strand of the siNA molecule is about 18 to about 28 nucleotides in length, the first strand of the siNA molecule comprises nucleotide sequence having sufficient complementarity to the HCV RNA for the siNA molecule to direct cleavage of the HCV RNA via RNA interference, and the second strand of said siNA molecule comprises nucleotide sequence that is complementary to the first strand.

[0021] In one embodiment, the invention features a double stranded short interfering nucleic acid (siNA) molecule that directs cleavage of a HCV RNA via RNA interference (RNAi), wherein the double stranded siNA molecule comprises a first and a second strand, each strand of the siNA molecule is about 18 to about 23 nucleotides in length, the first strand of the siNA molecule comprises nucleotide sequence having sufficient complementarity to the HCV RNA for the siNA molecule to direct cleavage of the HCV RNA via RNA interference, and the second strand of said siNA molecule comprises nucleotide sequence that is complementary to the first strand.

[0022] In one embodiment, the invention features a chemically synthesized double stranded short interfering nucleic acid (siNA) molecule that directs cleavage of a HCV RNA via RNA interference (RNAi), wherein each strand of the siNA molecule is about 18 to about 28 nucleotides in length; and one strand of the siNA molecule comprises nucleotide sequence having sufficient complementarity to the HCV RNA for the siNA molecule to direct cleavage of the HCV RNA via RNA interference.

[0023] In one embodiment, the invention features a chemically synthesized double stranded short interfering nucleic acid (siNA) molecule that directs cleavage of a HCV RNA via RNA interference (RNAi), wherein each strand of the siNA molecule is about 18 to about 23 nucleotides in length; and one strand of the siNA molecule comprises nucleotide sequence having sufficient complementarity to the HCV RNA for the siNA molecule to direct cleavage of the HCV RNA via RNA interference.

[0024] In one embodiment, the invention features a siNA molecule that down-regulates expression of a HCV gene or that directs cleavage of a HCV RNA, for example, wherein the HCV gene or RNA comprises HCV encoding sequence. In one embodiment, the invention features a siNA molecule that down-regulates expression of a HCV gene or that directs cleavage of a HCV RNA, for example, wherein the HCV gene of RNA comprises HCV non-coding sequence or regulatory elements involved in HCV gene expression.

[0025] In one embodiment, a siNA of the invention is used to inhibit the expression of HCV genes or a HCV gene family (e.g., different HCV strains), wherein the genes or gene family sequences share sequence homology. Such homologous sequences can be identified as is known in the art, for example using sequence alignments. siNA molecules can be designed to target such homologous sequences, for example using perfectly complementary sequences or by incorporating non-canonical base pairs, for example mismatches and/or wobble base pairs, that can provide additional target sequences. In instances where mismatches are identified, non-canonical base pairs (for example, mismatches and/or wobble bases) can be used to generate siNA molecules that target more than one gene sequence. In a non-limiting example, non-canonical base pairs such as UU and CC base pairs are used to generate siNA molecules that are capable of targeting sequences for differing HCV targets that share sequence homology. As such, one advantage of using siNAs of the invention is that a single siNA can be designed to include nucleic acid sequence that is complementary to the nucleotide sequence that is conserved between the homologous genes. In this approach, a single siNA can be used to inhibit expression of more than one gene instead of using more than one siNA molecule to target the different genes.

[0026] In one embodiment, the invention features a siNA molecule having RNAi activity against HCV RNA, wherein the siNA molecule comprises a sequence complementary to any RNA having HCV encoding sequence, such as those sequences having GenBank Accession Nos. shown in Table I. In another embodiment, the invention features a siNA molecule having RNAi activity against HCV RNA, wherein the siNA molecule comprises a sequence complementary to an RNA having variant HCV encoding sequence, for example other mutant HCV genes not shown in Table I but known in the art to be associated with, for example, the maintenance and/or development of HCV infection, liver failure, hepatocellular carcinoma, or cirrhosis. Chemical modifications as shown in Tables III and IV or otherwise described herein can be applied to any siNA construct of the invention. In another embodiment, a siNA molecule of the invention includes a nucleotide sequence that can interact with nucleotide sequence of a HCV gene and thereby mediate silencing of HCV gene expression, for example, wherein the siNA mediates regulation of HCV gene expression by cellular processes that modulate the transcription or translation of the HCV gene and prevent expression of the HCV gene.

[0027] In one embodiment, siNA molecules of the invention are used to down regulate or inhibit the expression of proteins arising from haplotype polymorphisms (e.g., cellular genes involved in HCV infection or replication) that are associated with a trait, disease or condition. Analysis of genes, or protein or RNA levels can be used to identify subjects with such polymorphisms or those subjects who are at risk of developing traits, conditions, or diseases described herein (see for example Silvestri et al., 2003, Int J Cancer., 104, 310-7). These subjects are amenable to treatment, for example, treatment with siNA molecules of the invention and any other composition useful in treating diseases related to HCV gene expression. As such, analysis of HCV protein or RNA levels can be used to determine treatment type and the course of therapy in treating a subject. Monitoring of HCV protein or RNA levels can be used to predict treatment outcome and to determine the efficacy of compounds and compositions that modulate the level and/or activity of certain HCV proteins associated with a trait, condition, or disease.

[0028] In one embodiment of the invention a siNA molecule comprises an antisense strand comprising a nucleotide sequence that is complementary to a nucleotide sequence or a portion thereof encoding a HCV protein. The siNA further comprises a sense strand, wherein said sense strand comprises a nucleotide sequence of a HCV gene or a portion thereof.

[0029] In another embodiment, a siNA molecule comprises an antisense region comprising a nucleotide sequence that is complementary to a nucleotide sequence encoding a HCV protein or a portion thereof. The siNA molecule further comprises a sense region, wherein said sense region comprises a nucleotide sequence of a HCV gene or a portion thereof.

[0030] In another embodiment, the invention features a siNA molecule comprising a nucleotide sequence in the antisense region of the siNA molecule that is complementary to a nucleotide sequence or portion of sequence of a HCV gene. In another embodiment, the invention features a siNA molecule comprising a region, for example, the antisense region of the siNA construct, complementary to a sequence comprising a HCV gene sequence or a portion thereof.

[0031] In one embodiment, the antisense region of HCV siNA constructs comprises a sequence complementary to sequence having any of SEQ ID NOs. 1-696 or 1393-1466. In one embodiment, the antisense region of HCV constructs comprises sequence having any of antisense SEQ ID NOs. in Tables II and III and FIGS. 4 and 5. In another embodiment, the sense region of HCV constructs comprises sequence having any of sense SEQ ID NOs. in Tables II and III and FIGS. 4 and 5.

[0032] In one embodiment, a siNA molecule of the invention comprises any of SEQ ID NOs. 1-2027. The sequences shown in SEQ ID NOs: 1-2027 are not limiting. A siNA molecule of the invention can comprise any contiguous HCV sequence (e.g., about 15 to about 25 or more, or about 15, 16, 17, 18, 19, 20, 21, 22, 23, 24, or 25 or more contiguous HCV nucleotides).

[0033] In yet another embodiment, the invention features a siNA molecule comprising a sequence, for example, the antisense sequence of the siNA construct, complementary to a sequence or portion of sequence comprising sequence represented by GenBank Accession Nos. shown in Table I. Chemical modifications in Tables III and IV and described herein can be applied to any siNA construct of the invention.

[0034] In one embodiment of the invention a siNA molecule comprises an antisense strand having about 15 to about 30 (e.g., about 15, 16, 17, 18, 19, 20, 21, 22, 23, 24, 25, 26, 27, 28, 29, or 30) nucleotides, wherein the antisense strand is complementary to a RNA sequence or a portion thereof encoding HCV or a HCV protein, and wherein said siNA further comprises a sense strand having about 15 to about 30 (e.g., about 15, 16, 17, 18, 19, 20, 21, 22, 23, 24, 25, 26, 27, 28, 29, or 30) nucleotides, and wherein said sense strand and said antisense strand are distinct nucleotide sequences where at least about 15 nucleotides in each strand are complementary to the other strand.

[0035] In another embodiment of the invention a siNA molecule of the invention comprises an antisense region having about 15 to about 30 (e.g., about 15, 16, 17, 18, 19, 20, 21, 22, 23, 24, 25, 26, 27, 28, 29, or 30) nucleotides, wherein the antisense region is complementary to a RNA sequence encoding HCV or a HCV protein, and wherein said siNA further comprises a sense region having about 15 to about 30 (e.g., about 15, 16, 17, 18, 19, 20, 21, 22, 23, 24, 25, 26, 27, 28, 29, or 30) nucleotides, wherein said sense region and said antisense region are comprised in a linear molecule where the sense region comprises at least about 15 nucleotides that are complementary to the antisense region.

[0036] In one embodiment, a siNA molecule of the invention has RNAi activity that modulates expression of RNA encoded by a HCV gene. Because HCV genes can share some degree of sequence homology with each other, siNA molecules can be designed to target a class of HCV genes (e.g., a class of different HCV strains) or alternately specific HCV genes (e.g., escape mutants, resistant strains, or other polymorphic variants) by selecting sequences that are either shared amongst different HCV targets or alternatively that are unique for a specific HCV target. Therefore, in one embodiment, the siNA molecule can be designed to target conserved regions of HCV RNA sequences having homology among several HCV gene variants so as to target a class of HCV genes with one siNA molecule. Accordingly, in one embodiment, the siNA molecule of the invention modulates the expression of one or more HCV stains in a subject or organism. In another embodiment, the siNA molecule can be designed to target a sequence that is unique to a specific HCV RNA sequence (e.g., a single HCV strain or HCV single nucleotide polymorphism (SNP)) due to the high degree of specificity that the siNA molecule requires to mediate RNAi activity.

[0037] In one embodiment, nucleic acid molecules of the invention that act as mediators of the RNA interference gene silencing response are double-stranded nucleic acid molecules. In another embodiment, the siNA molecules of the invention consist of duplex nucleic acid molecules containing about 15 to about 30 base pairs between oligonucleotides comprising about 15 to about 30 (e.g., about 15, 16, 17, 18, 19, 20, 21, 22, 23, 24, 25, 26, 27, 28, 29, or 30) nucleotides. In yet another embodiment, siNA molecules of the invention comprise duplex nucleic acid molecules with overhanging ends of about 1 to about 3 (e.g., about 1, 2, or 3) nucleotides, for example, about 21-nucleotide duplexes with about 19 base pairs and 3′-terminal mononucleotide, dinucleotide, or trinucleotide overhangs. In yet another embodiment, siNA molecules of the invention comprise duplex nucleic acid molecules with blunt ends, where both ends are blunt, or alternatively, where one of the ends is blunt.

[0038] In one embodiment, the invention features one or more chemically-modified siNA constructs having specificity for HCV expressing nucleic acid molecules, such as RNA encoding a HCV protein. In one embodiment, the invention features a RNA based siNA molecule (e.g., a siNA comprising 2′-OH nucleotides) having specificity for HCV expressing nucleic acid molecules that includes one or more chemical modifications described herein. Non-limiting examples of such chemical modifications include without limitation phosphorothioate internucleotide linkages, 2′-deoxyribonucleotides, 2′-O-methyl ribonucleotides, 2′-deoxy-2′-fluoro ribonucleotides, “universal base” nucleotides, “acyclic” nucleotides, 5-C-methyl nucleotides, and terminal glyceryl and/or inverted deoxy abasic residue incorporation. These chemical modifications, when used in various siNA constructs, (e.g., RNA based siNA constructs), are shown to preserve RNAi activity in cells while at the same time, dramatically increasing the serum stability of these compounds. Furthermore, contrary to the data published by Parrish et al., supra, applicant demonstrates that multiple (greater than one) phosphorothioate substitutions are well-tolerated and confer substantial increases in serum stability for modified siNA constructs.

[0039] In one embodiment, a siNA molecule of the invention comprises modified nucleotides while maintaining the ability to mediate RNAi. The modified nucleotides can be used to improve in vitro or in vivo characteristics such as stability, activity, and/or bioavailability. For example, a siNA molecule of the invention can comprise modified nucleotides as a percentage of the total number of nucleotides present in the siNA molecule. As such, a siNA molecule of the invention can generally comprise about 5% to about 100% modified nucleotides (e.g., about 5%, 10%, 15%, 20%, 25%, 30%, 35%, 40%, 45%, 50%, 55%, 60%, 65%, 70%, 75%, 80%, 85%, 90%, 95% or 100% modified nucleotides). The actual percentage of modified nucleotides present in a given siNA molecule will depend on the total number of nucleotides present in the siNA. If the siNA molecule is single stranded, the percent modification can be based upon the total number of nucleotides present in the single stranded siNA molecules. Likewise, if the siNA molecule is double stranded, the percent modification can be based upon the total number of nucleotides present in the sense strand, antisense strand, or both the sense and antisense strands.

[0040] One aspect of the invention features a double-stranded short interfering nucleic acid (siNA) molecule that down-regulates expression of a HCV gene or that directs cleavage of a HCV RNA. In one embodiment, the double stranded siNA molecule comprises one or more chemical modifications and each strand of the double-stranded siNA is about 21 nucleotides long. In one embodiment, the double-stranded siNA molecule does not contain any ribonucleotides. In another embodiment, the double-stranded siNA molecule comprises one or more ribonucleotides. In one embodiment, each strand of the double-stranded siNA molecule independently comprises about 15 to about 30 (e.g., about 15, 16, 17, 18, 19, 20, 21, 22, 23, 24, 25, 26, 27, 28, 29, or 30) nucleotides, wherein each strand comprises about 15 to about 30 (e.g., about 15, 16, 17, 18, 19, 20, 21, 22, 23, 24, 25, 26, 27, 28, 29, or 30) nucleotides that are complementary to the nucleotides of the other strand. In one embodiment, one of the strands of the double-stranded siNA molecule comprises a nucleotide sequence that is complementary to a nucleotide sequence or a portion thereof of the HCV gene, and the second strand of the double-stranded siNA molecule comprises a nucleotide sequence substantially similar to the nucleotide sequence of the HCV gene or a portion thereof.

[0041] In another embodiment, the invention features a double-stranded short interfering nucleic acid (siNA) molecule that down-regulates expression of a HCV gene or that directs cleavage of a HCV RNA, comprising an antisense region, wherein the antisense region comprises a nucleotide sequence that is complementary to a nucleotide sequence of the HCV gene or a portion thereof, and a sense region, wherein the sense region comprises a nucleotide sequence substantially similar to the nucleotide sequence of the HCV gene or a portion thereof. In one embodiment, the antisense region and the sense region independently comprise about 15 to about 30 (e.g. about 15, 16, 17, 18, 19, 20, 21, 22, 23, 24, 25, 26, 27, 28, 29, or 30) nucleotides, wherein the antisense region comprises about 15 to about 30 (e.g. about 15, 16, 17, 18, 19, 20, 21, 22, 23, 24, 25, 26, 27, 28, 29, or 30) nucleotides that are complementary to nucleotides of the sense region.

[0042] In another embodiment, the invention features a double-stranded short interfering nucleic acid (siNA) molecule that down-regulates expression of a HCV gene or that directs cleavage of a HCV RNA, comprising a sense region and an antisense region, wherein the antisense region comprises a nucleotide sequence that is complementary to a nucleotide sequence of RNA encoded by the HCV gene or a portion thereof and the sense region comprises a nucleotide sequence that is complementary to the antisense region.

[0043] In one embodiment, a siNA molecule of the invention comprises blunt ends, i.e., ends that do not include any overhanging nucleotides. For example, a siNA molecule comprising modifications described herein (e.g., comprising nucleotides having Formulae I-VII or siNA constructs comprising “Stab 00”-“Stab 32” (Table IV) or any combination thereof (see Table IV)) and/or any length described herein can comprise blunt ends or ends with no overhanging nucleotides.

[0044] In one embodiment, any siNA molecule of the invention can comprise one or more blunt ends, i.e. where a blunt end does not have any overhanging nucleotides. In one embodiment, the blunt ended siNA molecule has a number of base pairs equal to the number of nucleotides present in each strand of the siNA molecule. In another embodiment, the siNA molecule comprises one blunt end, for example wherein the 5′-end of the antisense strand and the 3′-end of the sense strand do not have any overhanging nucleotides. In another example, the siNA molecule comprises one blunt end, for example wherein the 3′-end of the antisense strand and the 5′-end of the sense strand do not have any overhanging nucleotides. In another example, a siNA molecule comprises two blunt ends, for example wherein the 3′-end of the antisense strand and the 5′-end of the sense strand as well as the 5′-end of the antisense strand and 3′-end of the sense strand do not have any overhanging nucleotides. A blunt ended siNA molecule can comprise, for example, from about 15 to about 30 nucleotides (e.g., about 15, 16, 17, 18, 19, 20, 21, 22, 23, 24, 25, 26, 27, 28, 29, or 30 nucleotides). Other nucleotides present in a blunt ended siNA molecule can comprise, for example, mismatches, bulges, loops, or wobble base pairs to modulate the activity of the siNA molecule to mediate RNA interference.

[0045] By “blunt ends” is meant symmetric termini or termini of a double stranded siNA molecule having no overhanging nucleotides. The two strands of a double stranded siNA molecule align with each other without over-hanging nucleotides at the termini. For example, a blunt ended siNA construct comprises terminal nucleotides that are complementary between the sense and antisense regions of the siNA molecule.

[0046] In one embodiment, the invention features a double-stranded short interfering nucleic acid (siNA) molecule that down-regulates expression of a HCV gene or that directs cleavage of a HCV RNA, wherein the siNA molecule is assembled from two separate oligonucleotide fragments wherein one fragment comprises the sense region and the second fragment comprises the antisense region of the siNA molecule. The sense region can be connected to the antisense region via a linker molecule, such as a polynucleotide linker or a non-nucleotide linker.

[0047] In one embodiment, the invention features double-stranded short interfering nucleic acid (siNA) molecule that down-regulates expression of a HCV gene or that directs cleavage of a HCV RNA, wherein the siNA molecule comprises about 15 to about 30 (e.g. about 15, 16, 17, 18, 19, 20, 21, 22, 23, 24, 25, 26, 27, 28, 29, or 30) base pairs, and wherein each strand of the siNA molecule comprises one or more chemical modifications. In another embodiment, one of the strands of the double-stranded siNA molecule comprises a nucleotide sequence that is complementary to a nucleotide sequence of a HCV gene or a portion thereof, and the second strand of the double-stranded siNA molecule comprises a nucleotide sequence substantially similar to the nucleotide sequence or a portion thereof of the HCV gene. In another embodiment, one of the strands of the double-stranded siNA molecule comprises a nucleotide sequence that is complementary to a nucleotide sequence of a HCV gene or portion thereof, and the second strand of the double-stranded siNA molecule comprises a nucleotide sequence substantially similar to the nucleotide sequence or portion thereof of the HCV gene. In another embodiment, each strand of the siNA molecule comprises about 15 to about 30 (e.g. about 15, 16, 17, 18, 19, 20, 21, 22, 23, 24, 25, 26, 27, 28, 29, or 30) nucleotides, and each strand comprises at least about 15 to about 30 (e.g. about 15, 16, 17, 18, 19, 20, 21, 22, 23, 24, 25, 26, 27, 28, 29, or 30) nucleotides that are complementary to the nucleotides of the other strand. The HCV gene can comprise, for example, sequences referred to in Table I.

[0048] In one embodiment, a siNA molecule of the invention comprises no ribonucleotides. In another embodiment, a siNA molecule of the invention comprises ribonucleotides.

[0049] In one embodiment, a siNA molecule of the invention comprises an antisense region comprising a nucleotide sequence that is complementary to a nucleotide sequence of a HCV gene or a portion thereof, and the siNA further comprises a sense region comprising a nucleotide sequence substantially similar to the nucleotide sequence of the HCV gene or a portion thereof. In another embodiment, the antisense region and the sense region each comprise about 15 to about 30 (e.g. about 15, 16, 17, 18, 19, 20, 21, 22, 23, 24, 25, 26, 27, 28, 29, or 30) nucleotides and the antisense region comprises at least about 15 to about 30 (e.g. about 15, 16, 17, 18, 19, 20, 21, 22, 23, 24, 25, 26, 27, 28, 29, or 30) nucleotides that are complementary to nucleotides of the sense region. The HCV gene can comprise, for example, sequences referred to in Table I. In another embodiment, the siNA is a double stranded nucleic acid molecule, where each of the two strands of the siNA molecule independently comprise about 15 to about 40 (e.g. about 15, 16, 17, 18, 19, 20, 21, 22, 23, 24, 25, 26, 27, 28, 29, 30, 31, 23, 33, 34, 35, 36, 37, 38, 39, or 40) nucleotides, and where one of the strands of the siNA molecule comprises at least about 15 (e.g. about 15, 16, 17, 18, 19, 20, 21, 22, 23, 24 or 25 or more) nucleotides that are complementary to the nucleic acid sequence of the HCV gene or a portion thereof.

[0050] In one embodiment, a siNA molecule of the invention comprises a sense region and an antisense region, wherein the antisense region comprises a nucleotide sequence that is complementary to a nucleotide sequence of RNA encoded by a HCV gene, or a portion thereof, and the sense region comprises a nucleotide sequence that is complementary to the antisense region. In one embodiment, the siNA molecule is assembled from two separate oligonucleotide fragments, wherein one fragment comprises the sense region and the second fragment comprises the antisense region of the siNA molecule. In another embodiment, the sense region is connected to the antisense region via a linker molecule. In another embodiment, the sense region is connected to the antisense region via a linker molecule, such as a nucleotide or non-nucleotide linker. The HCV gene can comprise, for example, sequences referred in to Table I.

[0051] In one embodiment, the invention features a double-stranded short interfering nucleic acid (siNA) molecule that down-regulates expression of a HCV gene or that directs cleavage of a HCV RNA, comprising a sense region and an antisense region, wherein the antisense region comprises a nucleotide sequence that is complementary to a nucleotide sequence of RNA encoded by the HCV gene or a portion thereof and the sense region comprises a nucleotide sequence that is complementary to the antisense region, and wherein the siNA molecule has one or more modified pyrimidine and/or purine nucleotides. In one embodiment, the pyrimidine nucleotides in the sense region are 2′-O-methylpyrimidine nucleotides or 2′-deoxy-2′-fluoro pyrimidine nucleotides and the purine nucleotides present in the sense region are 2′-deoxy purine nucleotides. In another embodiment, the pyrimidine nucleotides in the sense region are 2′-deoxy-2′-fluoro pyrimidine nucleotides and the purine nucleotides present in the sense region are 2′-O-methyl purine nucleotides. In another embodiment, the pyrimidine nucleotides in the sense region are 2′-deoxy-2′-fluoro pyrimidine nucleotides and the purine nucleotides present in the sense region are 2′-deoxy purine nucleotides. In one embodiment, the pyrimidine nucleotides in the antisense region are 2′-deoxy-2′-fluoro pyrimidine nucleotides and the purine nucleotides present in the antisense region are 2′-O-methyl or 2′-deoxy purine nucleotides. In another embodiment of any of the above-described siNA molecules, any nucleotides present in a non-complementary region of the sense strand (e.g. overhang region) are 2′-deoxy nucleotides.

[0052] In one embodiment, the invention features a double-stranded short interfering nucleic acid (siNA) molecule that down-regulates expression of a HCV gene or that directs cleavage of a HCV RNA, wherein the siNA molecule is assembled from two separate oligonucleotide fragments wherein one fragment comprises the sense region and the second fragment comprises the antisense region of the siNA molecule, and wherein the fragment comprising the sense region includes a terminal cap moiety at the 5′-end, the 3′-end, or both of the 5′ and 3′ ends of the fragment. In one embodiment, the terminal cap moiety is an inverted deoxy abasic moiety or glyceryl moiety. In one embodiment, each of the two fragments of the siNA molecule independently comprise about 15 to about 30 (e.g. about 15, 16, 17, 18, 19, 20, 21, 22, 23, 24, 25, 26, 27, 28, 29, or 30) nucleotides. In another embodiment, each of the two fragments of the siNA molecule independently comprise about 15 to about 40 (e.g. about 15, 16, 17, 18, 19, 20, 21, 22, 23, 24, 25, 26, 27, 28, 29, 30, 31, 23, 33, 34, 35, 36, 37, 38, 39, or 40) nucleotides. In a non-limiting example, each of the two fragments of the siNA molecule comprise about 21 nucleotides.

[0053] In one embodiment, the invention features a siNA molecule comprising at least one modified nucleotide, wherein the modified nucleotide is a 2′-deoxy-2′-fluoro nucleotide. The siNA can be, for example, about 15 to about 40 nucleotides in length. In one embodiment, all pyrimidine nucleotides present in the siNA are 2′-deoxy-2′-fluoro pyrimidine nucleotides. In one embodiment, the modified nucleotides in the siNA include at least one 2′-deoxy-2′-fluoro cytidine or 2′-deoxy-2′-fluoro uridine nucleotide. In another embodiment, the modified nucleotides in the siNA include at least one 2′-fluoro cytidine and at least one 2′-deoxy-2′-fluoro uridine nucleotides. In one embodiment, all uridine nucleotides present in the siNA are 2′-deoxy-2′-fluoro uridine nucleotides. In one embodiment, all cytidine nucleotides present in the siNA are 2′-deoxy-2′-fluoro cytidine nucleotides. In one embodiment, all adenosine nucleotides present in the siNA are 2′-deoxy-2′-fluoro adenosine nucleotides. In one embodiment, all guanosine nucleotides present in the siNA are 2′-deoxy-2′-fluoro guanosine nucleotides. The siNA can further comprise at least one modified internucleotidic linkage, such as phosphorothioate linkage. In one embodiment, the 2′-deoxy-2′-fluoronucleotides are present at specifically selected locations in the siNA that are sensitive to cleavage by ribonucleases, such as locations having pyrimidine nucleotides.

[0054] In one embodiment, the invention features a method of increasing the stability of a siNA molecule against cleavage by ribonucleases comprising introducing at least one modified nucleotide into the siNA molecule, wherein the modified nucleotide is a 2′-deoxy-2′-fluoro nucleotide. In one embodiment, all pyrimidine nucleotides present in the siNA are 2′-deoxy-2′-fluoro pyrimidine nucleotides. In one embodiment, the modified nucleotides in the siNA include at least one 2′-deoxy-2′-fluoro cytidine or 2′-deoxy-2′-fluoro uridine nucleotide. In another embodiment, the modified nucleotides in the siNA include at least one 2′-fluoro cytidine and at least one 2′-deoxy-2′-fluoro uridine nucleotides. In one embodiment, all uridine nucleotides present in the siNA are 2′-deoxy-2′-fluoro uridine nucleotides. In one embodiment, all cytidine nucleotides present in the siNA are 2′-deoxy-2′-fluoro cytidine nucleotides. In one embodiment, all adenosine nucleotides present in the siNA are 2′-deoxy-2′-fluoro adenosine nucleotides. In one embodiment, all guanosine nucleotides present in the siNA are 2′-deoxy-2′-fluoro guanosine nucleotides. The siNA can further comprise at least one modified internucleotidic linkage, such as phosphorothioate linkage. In one embodiment, the 2′-deoxy-2′-fluoronucleotides are present at specifically selected locations in the siNA that are sensitive to cleavage by ribonucleases, such as locations having pyrimidine nucleotides.

[0055] In one embodiment, the invention features a double-stranded short interfering nucleic acid (siNA) molecule that down-regulates expression of a HCV gene or that directs cleavage of a HCV RNA, comprising a sense region and an antisense region, wherein the antisense region comprises a nucleotide sequence that is complementary to a nucleotide sequence of RNA encoded by the HCV gene or a portion thereof and the sense region comprises a nucleotide sequence that is complementary to the antisense region, and wherein the purine nucleotides present in the antisense region comprise 2′-deoxy-purine nucleotides. In an alternative embodiment, the purine nucleotides present in the antisense region comprise 2′-O-methyl purine nucleotides. In either of the above embodiments, the antisense region can comprise a phosphorothioate internucleotide linkage at the 3′ end of the antisense region. Alternatively, in either of the above embodiments, the antisense region can comprise a glyceryl modification at the 3′ end of the antisense region. In another embodiment of any of the above-described siNA molecules, any nucleotides present in a non-complementary region of the antisense strand (e.g. overhang region) are 2′-deoxy nucleotides.

[0056] In one embodiment, the antisense region of a siNA molecule of the invention comprises sequence complementary to a portion of an endogenous transcript having sequence unique to a particular HCV disease related allele in a subject or organism, such as sequence comprising a single nucleotide polymorphism (SNP) associated with the disease specific allele. As such, the antisense region of a siNA molecule of the invention can comprise sequence complementary to sequences that are unique to a particular allele to provide specificity in mediating selective RNAi against the disease, condition, or trait related allele.

[0057] In one embodiment, the invention features a double-stranded short interfering nucleic acid (siNA) molecule that down-regulates expression of a HCV gene or that directs cleavage of a HCV RNA, wherein the siNA molecule is assembled from two separate oligonucleotide fragments wherein one fragment comprises the sense region and the second fragment comprises the antisense region of the siNA molecule. In another embodiment, the siNA molecule is a double stranded nucleic acid molecule, where each strand is about 21 nucleotides long and where about 19 nucleotides of each fragment of the siNA molecule are base-paired to the complementary nucleotides of the other fragment of the siNA molecule, wherein at least two 3′ terminal nucleotides of each fragment of the siNA molecule are not base-paired to the nucleotides of the other fragment of the siNA molecule. In another embodiment, the siNA molecule is a double stranded nucleic acid molecule, where each strand is about 19 nucleotide long and where the nucleotides of each fragment of the siNA molecule are base-paired to the complementary nucleotides of the other fragment of the siNA molecule to form at least about 15 (e.g., 15, 16, 17, 18, or 19) base pairs, wherein one or both ends of the siNA molecule are blunt ends. In one embodiment, each of the two 3′ terminal nucleotides of each fragment of the siNA molecule is a 2′-deoxy-pyrimidine nucleotide, such as a 2′-deoxy-thymidine. In another embodiment, all nucleotides of each fragment of the siNA molecule are base-paired to the complementary nucleotides of the other fragment of the siNA molecule. In another embodiment, the siNA molecule is a double stranded nucleic acid molecule of about 19 to about 25 base pairs having a sense region and an antisense region, where about 19 nucleotides of the antisense region are base-paired to the nucleotide sequence or a portion thereof of the RNA encoded by the HCV gene. In another embodiment, about 21 nucleotides of the antisense region are base-paired to the nucleotide sequence or a portion thereof of the RNA encoded by the HCV gene. In any of the above embodiments, the 5′-end of the fragment comprising said antisense region can optionally include a phosphate group.

[0058] In one embodiment, the invention features a double-stranded short interfering nucleic acid (siNA) molecule that inhibits the expression of a HCV RNA sequence (e.g., wherein said target RNA sequence is encoded by a HCV gene involved in the HCV pathway), wherein the siNA molecule does not contain any ribonucleotides and wherein each strand of the double-stranded siNA molecule is about 15 to about 30 nucleotides. In one embodiment, the siNA molecule is 21 nucleotides in length. Examples of non-ribonucleotide containing siNA constructs are combinations of stabilization chemistries shown in Table IV in any combination of Sense/Antisense chemistries, such as Stab 7/8, Stab 7/11, Stab 8/8, Stab 18/8, Stab 18/11, Stab 12/13, Stab 7/13, Stab 18/13, Stab 7/19, Stab 8/19, Stab 18/19, Stab 7/20, Stab 8/20, Stab 18/20, Stab 7/32, Stab 8/32, or Stab 18/32 (e.g., any siNA having Stab 7, 8, 11, 12, 13, 14, 15, 17, 18, 19, 20, or 32 sense or antisense strands or any combination thereof).

[0059] In one embodiment, the invention features a chemically synthesized double stranded RNA molecule that directs cleavage of a HCV RNA via RNA interference, wherein each strand of said RNA molecule is about 15 to about 30 nucleotides in length; one strand of the RNA molecule comprises nucleotide sequence having sufficient complementarity to the HCV RNA for the RNA molecule to direct cleavage of the HCV RNA via RNA interference; and wherein at least one strand of the RNA molecule optionally comprises one or more chemically modified nucleotides described herein, such as without limitation deoxynucleotides, 2′-O-methyl nucleotides, 2′-deoxy-2′-fluoro nucleotides, 2′-O-methoxyethyl nucleotides etc.

[0060] In one embodiment, the invention features a medicament comprising a siNA molecule of the invention.

[0061] In one embodiment, the invention features an active ingredient comprising a siNA molecule of the invention.

[0062] In one embodiment, the invention features the use of a double-stranded short interfering nucleic acid (siNA) molecule to inhibit, down-regulate, or reduce expression of a HCV gene, wherein the siNA molecule comprises one or more chemical modifications and each strand of the double-stranded siNA is independently about 15 to about 30 or more (e.g., about 15, 16, 17, 18, 19, 20, 21, 22, 23, 24, 25, 26, 27, 28, 29 or 30 or more) nucleotides long. In one embodiment, the siNA molecule of the invention is a double stranded nucleic acid molecule comprising one or more chemical modifications, where each of the two fragments of the siNA molecule independently comprise about 15 to about 40 (e.g. about 15, 16, 17, 18, 19, 20, 21, 22, 23, 24, 25, 26, 27, 28, 29, 30, 31, 23, 33, 34, 35, 36, 37, 38, 39, or 40) nucleotides and where one of the strands comprises at least 15 nucleotides that are complementary to nucleotide sequence of HCV encoding RNA or a portion thereof. In a non-limiting example, each of the two fragments of the siNA molecule comprise about 21 nucleotides. In another embodiment, the siNA molecule is a double stranded nucleic acid molecule comprising one or more chemical modifications, where each strand is about 21 nucleotide long and where about 19 nucleotides of each fragment of the siNA molecule are base-paired to the complementary nucleotides of the other fragment of the siNA molecule, wherein at least two 3′ terminal nucleotides of each fragment of the siNA molecule are not base-paired to the nucleotides of the other fragment of the siNA molecule. In another embodiment, the siNA molecule is a double stranded nucleic acid molecule comprising one or more chemical modifications, where each strand is about 19 nucleotide long and where the nucleotides of each fragment of the siNA molecule are base-paired to the complementary nucleotides of the other fragment of the siNA molecule to form at least about 15 (e.g., 15, 16, 17, 18, or 19) base pairs, wherein one or both ends of the siNA molecule are blunt ends. In one embodiment, each of the two 3′ terminal nucleotides of each fragment of the siNA molecule is a 2′-deoxy-pyrimidine nucleotide, such as a 2′-deoxy-thymidine. In another embodiment, all nucleotides of each fragment of the siNA molecule are base-paired to the complementary nucleotides of the other fragment of the siNA molecule. In another embodiment, the siNA molecule is a double stranded nucleic acid molecule of about 19 to about 25 base pairs having a sense region and an antisense region and comprising one or more chemical modifications, where about 19 nucleotides of the antisense region are base-paired to the nucleotide sequence or a portion thereof of the RNA encoded by the HCV gene. In another embodiment, about 21 nucleotides of the antisense region are base-paired to the nucleotide sequence or a portion thereof of the RNA encoded by the HCV gene. In any of the above embodiments, the 5′-end of the fragment comprising said antisense region can optionally include a phosphate group.

[0063] In one embodiment, the invention features the use of a double-stranded short interfering nucleic acid (siNA) molecule that inhibits, down-regulates, or reduces expression of a HCV gene, wherein one of the strands of the double-stranded siNA molecule is an antisense strand which comprises nucleotide sequence that is complementary to nucleotide sequence of HCV RNA or a portion thereof, the other strand is a sense strand which comprises nucleotide sequence that is complementary to a nucleotide sequence of the antisense strand and wherein a majority of the pyrimidine nucleotides present in the double-stranded siNA molecule comprises a sugar modification.

[0064] In one embodiment, the invention features a double-stranded short interfering nucleic acid (siNA) molecule that inhibits, down-regulates, or reduces expression of a HCV gene, wherein one of the strands of the double-stranded siNA molecule is an antisense strand which comprises nucleotide sequence that is complementary to nucleotide sequence of HCV RNA or a portion thereof, wherein the other strand is a sense strand which comprises nucleotide sequence that is complementary to a nucleotide sequence of the antisense strand and wherein a majority of the pyrimidine nucleotides present in the double-stranded siNA molecule comprises a sugar modification.

[0065] In one embodiment, the invention features a double-stranded short interfering nucleic acid (siNA) molecule that inhibits, down-regulates, or reduces expression of a HCV gene, wherein one of the strands of the double-stranded siNA molecule is an antisense strand which comprises nucleotide sequence that is complementary to nucleotide sequence of HCV RNA that encodes a protein or portion thereof, the other strand is a sense strand which comprises nucleotide sequence that is complementary to a nucleotide sequence of the antisense strand and wherein a majority of the pyrimidine nucleotides present in the double-stranded siNA molecule comprises a sugar modification. In one embodiment, each strand of the siNA molecule comprises about 15 to about 30 or more (e.g., about 15, 16, 17, 18, 19, 20, 21, 22, 23, 24, 25, 26, 27, 28, 29, or 30 or more) nucleotides, wherein each strand comprises at least about 15 nucleotides that are complementary to the nucleotides of the other strand. In one embodiment, the siNA molecule is assembled from two oligonucleotide fragments, wherein one fragment comprises the nucleotide sequence of the antisense strand of the siNA molecule and a second fragment comprises nucleotide sequence of the sense region of the siNA molecule. In one embodiment, the sense strand is connected to the antisense strand via a linker molecule, such as a polynucleotide linker or a non-nucleotide linker. In a further embodiment, the pyrimidine nucleotides present in the sense strand are 2′-deoxy-2′fluoro pyrimidine nucleotides and the purine nucleotides present in the sense region are 2′-deoxy purine nucleotides. In another embodiment, the pyrimidine nucleotides present in the sense strand are 2′-deoxy-2′fluoro pyrimidine nucleotides and the purine nucleotides present in the sense region are 2′-O-methyl purine nucleotides. In still another embodiment, the pyrimidine nucleotides present in the antisense strand are 2′-deoxy-2′-fluoro pyrimidine nucleotides and any purine nucleotides present in the antisense strand are 2′-deoxy purine nucleotides. In another embodiment, the antisense strand comprises one or more 2′-deoxy-2′-fluoro pyrimidine nucleotides and one or more 2′-O-methyl purine nucleotides. In another embodiment, the pyrimidine nucleotides present in the antisense strand are 2′-deoxy-2′-fluoro pyrimidine nucleotides and any purine nucleotides present in the antisense strand are 2′-O-methyl purine nucleotides. In a further embodiment the sense strand comprises a 3′-end and a 5′-end, wherein a terminal cap moiety (e.g., an inverted deoxy abasic moiety or inverted deoxy nucleotide moiety such as inverted thymidine) is present at the 5′-end, the 3′-end, or both of the 5′ and 3′ ends of the sense strand. In another embodiment, the antisense strand comprises a phosphorothioate internucleotide linkage at the 3′ end of the antisense strand. In another embodiment, the antisense strand comprises a glyceryl modification at the 3′ end. In another embodiment, the 5′-end of the antisense strand optionally includes a phosphate group.

[0066] In any of the above-described embodiments of a double-stranded short interfering nucleic acid (siNA) molecule that inhibits expression of a HCV gene, wherein a majority of the pyrimidine nucleotides present in the double-stranded siNA molecule comprises a sugar modification, each of the two strands of the siNA molecule can comprise about 15 to about 30 or more (e.g., about 15, 16, 17, 18, 19, 20, 21, 22, 23, 24, 25, 26, 27, 28, 29, or 30 or more) nucleotides. In one embodiment, about 15 to about 30 or more (e.g., about 15, 16, 17, 18, 19, 20, 21, 22, 23, 24, 25, 26, 27, 28, 29, or 30 or more) nucleotides of each strand of the siNA molecule are base-paired to the complementary nucleotides of the other strand of the siNA molecule. In another embodiment, about 15 to about 30 or more (e.g., about 15, 16, 17, 18, 19, 20, 21, 22, 23, 24, 25, 26, 27, 28, 29, or 30 or more) nucleotides of each strand of the siNA molecule are base-paired to the complementary nucleotides of the other strand of the siNA molecule, wherein at least two 3′ terminal nucleotides of each strand of the siNA molecule are not base-paired to the nucleotides of the other strand of the siNA molecule. In another embodiment, each of the two 3′ terminal nucleotides of each fragment of the siNA molecule is a 2′-deoxy-pyrimidine, such as 2′-deoxy-thymidine. In one embodiment, each strand of the siNA molecule is base-paired to the complementary nucleotides of the other strand of the siNA molecule. In one embodiment, about 15 to about 30 (e.g., about 15, 16, 17, 18, 19, 20, 21, 22, 23, 24, 25, 26, 27, 28, 29, or 30) nucleotides of the antisense strand are base-paired to the nucleotide sequence of the HCV RNA or a portion thereof. In one embodiment, about 18 to about 25 (e.g., about 18, 19, 20, 21, 22, 23, 24, or 25) nucleotides of the antisense strand are base-paired to the nucleotide sequence of the HCV RNA or a portion thereof.

[0067] In one embodiment, the invention features a double-stranded short interfering nucleic acid (siNA) molecule that inhibits expression of a HCV gene, wherein one of the strands of the double-stranded siNA molecule is an antisense strand which comprises nucleotide sequence that is complementary to nucleotide sequence of HCV RNA or a portion thereof, the other strand is a sense strand which comprises nucleotide sequence that is complementary to a nucleotide sequence of the antisense strand and wherein a majority of the pyrimidine nucleotides present in the double-stranded siNA molecule comprises a sugar modification, and wherein the 5′-end of the antisense strand optionally includes a phosphate group.

[0068] In one embodiment, the invention features a double-stranded short interfering nucleic acid (siNA) molecule that inhibits expression of a HCV gene, wherein one of the strands of the double-stranded siNA molecule is an antisense strand which comprises nucleotide sequence that is complementary to nucleotide sequence of HCV RNA or a portion thereof, the other strand is a sense strand which comprises nucleotide sequence that is complementary to a nucleotide sequence of the antisense strand and wherein a majority of the pyrimidine nucleotides present in the double-stranded siNA molecule comprises a sugar modification, and wherein the nucleotide sequence or a portion thereof of the antisense strand is complementary to a nucleotide sequence of the untranslated region or a portion thereof of the HCV RNA.

[0069] In one embodiment, the invention features a double-stranded short interfering nucleic acid (siNA) molecule that inhibits expression of a HCV gene, wherein one of the strands of the double-stranded siNA molecule is an antisense strand which comprises nucleotide sequence that is complementary to nucleotide sequence of HCV RNA or a portion thereof, wherein the other strand is a sense strand which comprises nucleotide sequence that is complementary to a nucleotide sequence of the antisense strand, wherein a majority of the pyrimidine nucleotides present in the double-stranded siNA molecule comprises a sugar modification, and wherein the nucleotide sequence of the antisense strand is complementary to a nucleotide sequence of the HCV RNA or a portion thereof that is present in the HCV RNA.

[0070] In one embodiment, the invention features a composition comprising a siNA molecule of the invention in a pharmaceutically acceptable carrier or diluent.

[0071] In a non-limiting example, the introduction of chemically-modified nucleotides into nucleic acid molecules provides a powerful tool in overcoming potential limitations of in vivo stability and bioavailability inherent to native RNA molecules that are delivered exogenously. For example, the use of chemically-modified nucleic acid molecules can enable a lower dose of a particular nucleic acid molecule for a given therapeutic effect since chemically-modified nucleic acid molecules tend to have a longer half-life in serum. Furthermore, certain chemical modifications can improve the bioavailability of nucleic acid molecules by targeting particular cells or tissues and/or improving cellular uptake of the nucleic acid molecule. Therefore, even if the activity of a chemically-modified nucleic acid molecule is reduced as compared to a native nucleic acid molecule, for example, when compared to an all-RNA nucleic acid molecule, the overall activity of the modified nucleic acid molecule can be greater than that of the native molecule due to improved stability and/or delivery of the molecule. Unlike native unmodified siNA, chemically-modified siNA can also minimize the possibility of activating interferon activity in humans.

[0072] In any of the embodiments of siNA molecules described herein, the antisense region of a siNA molecule of the invention can comprise a phosphorothioate internucleotide linkage at the 3′-end of said antisense region. In any of the embodiments of siNA molecules described herein, the antisense region can comprise about one to about five phosphorothioate internucleotide linkages at the 5′-end of said antisense region. In any of the embodiments of siNA molecules described herein, the 3′-terminal nucleotide overhangs of a siNA molecule of the invention can comprise ribonucleotides or deoxyribonucleotides that are chemically-modified at a nucleic acid sugar, base, or backbone. In any of the embodiments of siNA molecules described herein, the 3′-terminal nucleotide overhangs can comprise one or more universal base ribonucleotides. In any of the embodiments of siNA molecules described herein, the 3′-terminal nucleotide overhangs can comprise one or more acyclic nucleotides.

[0073] One embodiment of the invention provides an expression vector comprising a nucleic acid sequence encoding at least one siNA molecule of the invention in a manner that allows expression of the nucleic acid molecule. Another embodiment of the invention provides a mammalian cell comprising such an expression vector. The mammalian cell can be a human cell. The siNA molecule of the expression vector can comprise a sense region and an antisense region. The antisense region can comprise sequence complementary to a RNA or DNA sequence encoding HCV and the sense region can comprise sequence complementary to the antisense region. The siNA molecule can comprise two distinct strands having complementary sense and antisense regions. The siNA molecule can comprise a single strand having complementary sense and antisense regions.

[0074] In one embodiment, the invention features a chemically-modified short interfering nucleic acid (siNA) molecule capable of mediating RNA interference (RNAi) against HCV inside a cell or reconstituted in vitro system, wherein the chemical modification comprises one or more (e.g., about 1, 2, 3, 4, 5, 6, 7, 8, 9, 10, or more) nucleotides comprising a backbone modified internucleotide linkage having Formula I: [chemical structure]
[0075] wherein each R1 and R2 is independently any nucleotide, non-nucleotide, or polynucleotide which can be naturally-occurring or chemically-modified, each X and Y is independently O, S, N, alkyl, or substituted alkyl, each Z and W is independently O, S, N, alkyl, substituted alkyl, O-alkyl, S-alkyl, alkaryl, aralkyl, or acetyl and wherein W, X, Y, and Z are optionally not all O. In another embodiment, a backbone modification of the invention comprises a phosphonoacetate and/or thiophosphonoacetate internucleotide linkage (see for example Sheehan et al., 2003, Nucleic Acids Research, 31, 4109-4118).

[0076] The chemically-modified internucleotide linkages having Formula I, for example, wherein any Z, W, X, and/or Y independently comprises a sulphur atom, can be present in one or both oligonucleotide strands of the siNA duplex, for example, in the sense strand, the antisense strand, or both strands. The siNA molecules of the invention can comprise one or more (e.g., about 1, 2, 3, 4, 5, 6, 7, 8, 9, 10, or more) chemically-modified internucleotide linkages having Formula I at the 3′-end, the 5′-end, or both of the 3′ and 5′-ends of the sense strand, the antisense strand, or both strands. For example, an exemplary siNA molecule of the invention can comprise about 1 to about 5 or more (e.g., about 1, 2, 3, 4, 5, or more) chemically-modified internucleotide linkages having Formula I at the 5′-end of the sense strand, the antisense strand, or both strands. In another non-limiting example, an exemplary siNA molecule of the invention can comprise one or more (e.g., about 1, 2, 3, 4, 5, 6, 7, 8, 9, 10, or more) pyrimidine nucleotides with chemically-modified internucleotide linkages having Formula I in the sense strand, the antisense strand, or both strands. In yet another non-limiting example, an exemplary siNA molecule of the invention can comprise one or more (e.g., about 1, 2, 3, 4, 5, 6, 7, 8, 9, 10, or more) purine nucleotides with chemically-modified internucleotide linkages having Formula I in the sense strand, the antisense strand, or both strands. In another embodiment, a siNA molecule of the invention having internucleotide linkage(s) of Formula I also comprises a chemically-modified nucleotide or non-nucleotide having any of Formulae I-VII.

[0077] In one embodiment, the invention features a chemically-modified short interfering nucleic acid (siNA) molecule capable of mediating RNA interference (RNAi) against HCV inside a cell or reconstituted in vitro system, wherein the chemical modification comprises one or more (e.g., about 1, 2, 3, 4, 5, 6, 7, 8, 9, 10, or more) nucleotides or non-nucleotides having Formula II: [chemical structure]
wherein each R3, R4, R5, R6, R7, R8, R10, R11 and R12 is independently H, OH, alkyl, substituted alkyl, alkaryl or aralkyl, F, Cl, Br, CN, CF3, OCF3, OCN, O-alkyl, S-alkyl, N-alkyl, O-alkenyl, S-alkenyl, N-alkenyl, SO-alkyl, alkyl-OSH, alkyl-OH, O-alkyl-OH, O-alkyl-SH, S-alkyl-OH, S-alkyl-SH, alkyl-S-alkyl, alkyl-O-alkyl, ONO2, NO2, N3, NH2, aminoalkyl, aminoacid, aminoacyl, ONH2, O-aminoalkyl, O-aminoacid, O-aminoacyl, heterocycloalkyl, heterocycloalkaryl, aminoalkylamino, polyalklylamino, substituted silyl, or group having Formula I or II; R9 is O, S, CH2, S═O, CHF, or CF2, and B is a nucleosidic base such as adenine, guanine, uracil, cytosine, thymine, 2-aminoadenosine, 5-methylcytosine, 2,6-diaminopurine, or any other non-naturally occurring base that can be complementary or non-complementary to target RNA or a non-nucleosidic base such as phenyl, naphthyl, 3-nitropyrrole, 5-nitroindole, nebularine, pyridone, pyridinone, or any other non-naturally occurring universal base that can be complementary or non-complementary to target RNA.

[0078] The chemically-modified nucleotide or non-nucleotide of Formula II can be present in one or both oligonucleotide strands of the siNA duplex, for example in the sense strand, the antisense strand, or both strands. The siNA molecules of the invention can comprise one or more chemically-modified nucleotides or non-nucleotides of Formula II at the 3′-end, the 5′-end, or both of the 3′ and 5′-ends of the sense strand, the antisense strand, or both strands. For example, an exemplary siNA molecule of the invention can comprise about 1 to about 5 or more (e.g., about 1, 2, 3, 4, 5, or more) chemically-modified nucleotides or non-nucleotides of Formula II at the 5′-end of the sense strand, the antisense strand, or both strands. In anther non-limiting example, an exemplary siNA molecule of the invention can comprise about 1 to about 5 or more (e.g., about 1, 2, 3, 4, 5, or more) chemically-modified nucleotides or non-nucleotides of Formula II at the 3′-end of the sense strand, the antisense strand, or both strands.

[0079] In one embodiment, the invention features a chemically-modified short interfering nucleic acid (siNA) molecule capable of mediating RNA interference (RNAi) against HCV inside a cell or reconstituted in vitro system, wherein the chemical modification comprises one or more (e.g., about 1, 2, 3, 4, 5, 6, 7, 8, 9, 10, or more) nucleotides or non-nucleotides having Formula III: [chemical structure]
wherein each R3, R4, R5, R6, R7, R8, R10, R11 and R12 is independently H, OH, alkyl, substituted alkyl, alkaryl or aralkyl, F, Cl, Br, CN, CF3, OCF3, OCN, O-alkyl, S-alkyl, N-alkyl, O-alkenyl, S-alkenyl, N-alkenyl, SO-alkyl, alkyl-OSH, alkyl-OH, O-alkyl-OH, O-alkyl-SH, S-alkyl-OH, S-alkyl-SH, alkyl-S-alkyl, alkyl-O-alkyl, ONO2, NO2, N3, NH2, aminoalkyl, aminoacid, aminoacyl, ONH2, O-aminoalkyl, O-aminoacid, O-aminoacyl, heterocycloalkyl, heterocycloalkaryl, aminoalkylamino, polyalklylamino, substituted silyl, or group having Formula I or II; R9 is O, S, CH2, S═O, CHF, or CF2, and B is a nucleosidic base such as adenine, guanine, uracil, cytosine, thymine, 2-aminoadenosine, 5-methylcytosine, 2,6-diaminopurine, or any other non-naturally occurring base that can be employed to be complementary or non-complementary to target RNA or a non-nucleosidic base such as phenyl, naphthyl, 3-nitropyrrole, 5-nitroindole, nebularine, pyridone, pyridinone, or any other non-naturally occurring universal base that can be complementary or non-complementary to target RNA.

[0080] The chemically-modified nucleotide or non-nucleotide of Formula III can be present in one or both oligonucleotide strands of the siNA duplex, for example, in the sense strand, the antisense strand, or both strands. The siNA molecules of the invention can comprise one or more chemically-modified nucleotides or non-nucleotides of Formula III at the 3′-end, the 5′-end, or both of the 3′ and 5′-ends of the sense strand, the antisense strand, or both strands. For example, an exemplary siNA molecule of the invention can comprise about 1 to about 5 or more (e.g., about 1, 2, 3, 4, 5, or more) chemically-modified nucleotide(s) or non-nucleotide(s) of Formula III at the 5′-end of the sense strand, the antisense strand, or both strands. In anther non-limiting example, an exemplary siNA molecule of the invention can comprise about 1 to about 5 or more (e.g., about 1, 2, 3, 4, 5, or more) chemically-modified nucleotide or non-nucleotide of Formula III at the 3′-end of the sense strand, the antisense strand, or both strands.

[0081] In another embodiment, a siNA molecule of the invention comprises a nucleotide having Formula II or III, wherein the nucleotide having Formula II or III is in an inverted configuration. For example, the nucleotide having Formula II or III is connected to the siNA construct in a 3′-3′,3′-2′,2′-3′, or 5′-5′ configuration, such as at the 3′-end, the 5′-end, or both of the 3′ and 5′-ends of one or both siNA strands.

[0082] In one embodiment, the invention features a chemically-modified short interfering nucleic acid (siNA) molecule capable of mediating RNA interference (RNAi) against HCV inside a cell or reconstituted in vitro system, wherein the chemical modification comprises a 5′-terminal phosphate group having Formula IV: [chemical structure]
wherein each X and Y is independently O, S, N, alkyl, substituted alkyl, or alkylhalo; wherein each Z and W is independently O, S, N, alkyl, substituted alkyl, O-alkyl, S-alkyl, alkaryl, aralkyl, alkylhalo, or acetyl; and wherein W, X, Y and Z are not all 0.

[0083] In one embodiment, the invention features a siNA molecule having a 5′-terminal phosphate group having Formula IV on the target-complementary strand, for example, a strand complementary to a target RNA, wherein the siNA molecule comprises an all RNA siNA molecule. In another embodiment, the invention features a siNA molecule having a 5′-terminal phosphate group having Formula IV on the target-complementary strand wherein the siNA molecule also comprises about 1 to about 3 (e.g., about 1, 2, or 3) nucleotide 3′-terminal nucleotide overhangs having about 1 to about 4 (e.g., about 1, 2, 3, or 4) deoxyribonucleotides on the 3′-end of one or both strands. In another embodiment, a 5′-terminal phosphate group having Formula IV is present on the target-complementary strand of a siNA molecule of the invention, for example a siNA molecule having chemical modifications having any of Formulae I-VII.

[0084] In one embodiment, the invention features a chemically-modified short interfering nucleic acid (siNA) molecule capable of mediating RNA interference (RNAi) against HCV inside a cell or reconstituted in vitro system, wherein the chemical modification comprises one or more phosphorothioate internucleotide linkages. For example, in a non-limiting example, the invention features a chemically-modified short interfering nucleic acid (siNA) having about 1, 2, 3, 4, 5, 6, 7, 8 or more phosphorothioate internucleotide linkages in one siNA strand. In yet another embodiment, the invention features a chemically-modified short interfering nucleic acid (siNA) individually having about 1, 2, 3, 4, 5, 6, 7, 8 or more phosphorothioate internucleotide linkages in both siNA strands. The phosphorothioate internucleotide linkages can be present in one or both oligonucleotide strands of the siNA duplex, for example in the sense strand, the antisense strand, or both strands. The siNA molecules of the invention can comprise one or more phosphorothioate internucleotide linkages at the 3′-end, the 5′-end, or both of the 3′- and 5′-ends of the sense strand, the antisense strand, or both strands. For example, an exemplary siNA molecule of the invention can comprise about 1 to about 5 or more (e.g., about 1, 2, 3, 4, 5, or more) consecutive phosphorothioate internucleotide linkages at the 5′-end of the sense strand, the antisense strand, or both strands. In another non-limiting example, an exemplary siNA molecule of the invention can comprise one or more (e.g., about 1, 2, 3, 4, 5, 6, 7, 8, 9, 10, or more) pyrimidine phosphorothioate internucleotide linkages in the sense strand, the antisense strand, or both strands. In yet another non-limiting example, an exemplary siNA molecule of the invention can comprise one or more (e.g., about 1, 2, 3, 4, 5, 6, 7, 8, 9, 10, or more) purine phosphorothioate internucleotide linkages in the sense strand, the antisense strand, or both strands.

[0085] In one embodiment, the invention features a siNA molecule, wherein the sense strand comprises one or more, for example, about 1, 2, 3, 4, 5, 6, 7, 8, 9, 10, or more phosphorothioate internucleotide linkages, and/or one or more (e.g., about 1, 2, 3, 4, 5, 6, 7, 8, 9, 10 or more) 2′-deoxy, 2′-O-methyl, 2′-deoxy-2′-fluoro, and/or about one or more (e.g., about 1, 2, 3, 4, 5, 6, 7, 8, 9, 10 or more) universal base modified nucleotides, and optionally a terminal cap molecule at the 3′-end, the 5′-end, or both of the 3′- and 5′-ends of the sense strand; and wherein the antisense strand comprises about 1 to about 10 or more, specifically about 1, 2, 3, 4, 5, 6, 7, 8, 9, 10, or more phosphorothioate internucleotide linkages, and/or one or more (e.g., about 1, 2, 3, 4, 5, 6, 7, 8, 9, 10 or more) 2′-deoxy, 2′-O-methyl, 2′-deoxy-2′-fluoro, and/or one or more (e.g., about 1, 2, 3, 4, 5, 6, 7, 8, 9, 10 or more) universal base modified nucleotides, and optionally a terminal cap molecule at the 3′-end, the 5′-end, or both of the 3′- and 5′-ends of the antisense strand. In another embodiment, one or more, for example about 1, 2, 3, 4, 5, 6, 7, 8, 9, 10, or more, pyrimidine nucleotides of the sense and/or antisense siNA strand are chemically-modified with 2′-deoxy, 2′-O-methyl and/or 2′-deoxy-2′-fluoro nucleotides, with or without one or more, for example about 1, 2, 3, 4, 5, 6, 7, 8, 9, 10, or more, phosphorothioate internucleotide linkages and/or a terminal cap molecule at the 3′-end, the 5′-end, or both of the 3′- and 5′-ends, being present in the same or different strand.

[0086] In another embodiment, the invention features a siNA molecule, wherein the sense strand comprises about 1 to about 5, specifically about 1, 2, 3, 4, or 5 phosphorothioate internucleotide linkages, and/or one or more (e.g., about 1, 2, 3, 4, 5, or more) 2′-deoxy, 2′-O-methyl, 2′-deoxy-2′-fluoro, and/or one or more (e.g., about 1, 2, 3, 4, 5, or more) universal base modified nucleotides, and optionally a terminal cap molecule at the 3-end, the 5′-end, or both of the 3′- and 5′-ends of the sense strand; and wherein the antisense strand comprises about 1 to about 5 or more, specifically about 1, 2, 3, 4, 5, or more phosphorothioate internucleotide linkages, and/or one or more (e.g., about 1, 2, 3, 4, 5, 6, 7, 8, 9, 10 or more) 2′-deoxy, 2′-O-methyl, 2′-deoxy-2′-fluoro, and/or one or more (e.g., about 1, 2, 3, 4, 5, 6, 7, 8, 9, 10 or more) universal base modified nucleotides, and optionally a terminal cap molecule at the 3′-end, the 5′-end, or both of the 3′- and 5′-ends of the antisense strand. In another embodiment, one or more, for example about 1, 2, 3, 4, 5, 6, 7, 8, 9, 10, or more, pyrimidine nucleotides of the sense and/or antisense siNA strand are chemically-modified with 2′-deoxy, 2′-O-methyl and/or 2′-deoxy-2′-fluoro nucleotides, with or without about 1 to about 5 or more, for example about 1, 2, 3, 4, 5, or more phosphorothioate internucleotide linkages and/or a terminal cap molecule at the 3′-end, the 5′-end, or both of the 3′- and 5′-ends, being present in the same or different strand.

[0087] In one embodiment, the invention features a siNA molecule, wherein the antisense strand comprises one or more, for example, about 1, 2, 3, 4, 5, 6, 7, 8, 9, 10, or more phosphorothioate internucleotide linkages, and/or about one or more (e.g., about 1, 2, 3, 4, 5, 6, 7, 8, 9, 10 or more) 2′-deoxy, 2′-O-methyl, 2′-deoxy-2′-fluoro, and/or one or more (e.g., about 1, 2, 3, 4, 5, 6, 7, 8, 9, 10 or more) universal base modified nucleotides, and optionally a terminal cap molecule at the 3′-end, the 5′-end, or both of the 3′- and 5′-ends of the sense strand; and wherein the antisense strand comprises about 1 to about 10 or more, specifically about 1, 2, 3, 4, 5, 6, 7, 8, 9, 10 or more phosphorothioate internucleotide linkages, and/or one or more (e.g., about 1, 2, 3, 4, 5, 6, 7, 8, 9, 10 or more) 2′-deoxy, 2′-O-methyl, 2′-deoxy-2′-fluoro, and/or one or more (e.g., about 1, 2, 3, 4, 5, 6, 7, 8, 9, 10 or more) universal base modified nucleotides, and optionally a terminal cap molecule at the 3′-end, the 5′-end, or both of the 3′- and 5′-ends of the antisense strand. In another embodiment, one or more, for example about 1, 2, 3, 4, 5, 6, 7, 8, 9, 10 or more pyrimidine nucleotides of the sense and/or antisense siNA strand are chemically-modified with 2′-deoxy, 2′-O-methyl and/or 2′-deoxy-2′-fluoro nucleotides, with or without one or more, for example, about 1, 2, 3, 4, 5, 6, 7, 8, 9, 10 or more phosphorothioate internucleotide linkages and/or a terminal cap molecule at the 3′-end, the 5′-end, or both of the 3′ and 5′-ends, being present in the same or different strand.

[0088] In another embodiment, the invention features a siNA molecule, wherein the antisense strand comprises about 1 to about 5 or more, specifically about 1, 2, 3, 4, 5 or more phosphorothioate internucleotide linkages, and/or one or more (e.g., about 1, 2, 3, 4, 5, 6, 7, 8, 9, 10 or more) 2′-deoxy, 2′-O-methyl, 2′-deoxy-2′-fluoro, and/or one or more (e.g., about 1, 2, 3, 4, 5, 6, 7, 8, 9, 10 or more) universal base modified nucleotides, and optionally a terminal cap molecule at the 3′-end, the 5′-end, or both of the 3′- and 5′-ends of the sense strand; and wherein the antisense strand comprises about 1 to about 5 or more, specifically about 1, 2, 3, 4, 5 or more phosphorothioate internucleotide linkages, and/or one or more (e.g., about 1, 2, 3, 4, 5, 6, 7, 8, 9, 10 or more) 2′-deoxy, 2′-O-methyl, 2′-deoxy-2′-fluoro, and/or one or more (e.g., about 1, 2, 3, 4, 5, 6, 7, 8, 9, 10 or more) universal base modified nucleotides, and optionally a terminal cap molecule at the 3′-end, the 5′-end, or both of the 3′- and 5′-ends of the antisense strand. In another embodiment, one or more, for example about 1, 2, 3, 4, 5, 6, 7, 8, 9, 10 or more pyrimidine nucleotides of the sense and/or antisense siNA strand are chemically-modified with 2′-deoxy, 2′-O-methyl and/or 2′-deoxy-2′-fluoro nucleotides, with or without about 1 to about 5, for example about 1, 2, 3, 4, 5 or more phosphorothioate internucleotide linkages and/or a terminal cap molecule at the 3′-end, the 5′-end, or both of the 3′- and 5′-ends, being present in the same or different strand.

[0089] In one embodiment, the invention features a chemically-modified short interfering nucleic acid (siNA) molecule having about 1 to about 5 or more (specifically about 1, 2, 3, 4, 5 or more) phosphorothioate internucleotide linkages in each strand of the siNA molecule.

[0090] In another embodiment, the invention features a siNA molecule comprising 2′-5′ internucleotide linkages. The 2′-5′ internucleotide linkage(s) can be at the 3′-end, the 5′-end, or both of the 3′- and 5′-ends of one or both siNA sequence strands. In addition, the 2′-5′ internucleotide linkage(s) can be present at various other positions within one or both siNA sequence strands, for example, about 1, 2, 3, 4, 5, 6, 7, 8, 9, 10, or more including every internucleotide linkage of a pyrimidine nucleotide in one or both strands of the siNA molecule can comprise a 2′-5′ internucleotide linkage, or about 1, 2, 3, 4, 5, 6, 7, 8, 9, 10, or more including every internucleotide linkage of a purine nucleotide in one or both strands of the siNA molecule can comprise a 2′-5′ internucleotide linkage.

[0091] In another embodiment, a chemically-modified siNA molecule of the invention comprises a duplex having two strands, one or both of which can be chemically-modified, wherein each strand is independently about 15 to about 30 (e.g., about 15, 16, 17, 18, 19, 20, 21, 22, 23, 24, 25, 26, 27, 28, 29, or 30) nucleotides in length, wherein the duplex has about 15 to about 30 (e.g., about 15, 16, 17, 18, 19, 20, 21, 22, 23, 24, 25, 26, 27, 28, 29, or 30) base pairs, and wherein the chemical modification comprises a structure having any of Formulae I-VII. For example, an exemplary chemically-modified siNA molecule of the invention comprises a duplex having two strands, one or both of which can be chemically-modified with a chemical modification having any of Formulae I-VII or any combination thereof, wherein each strand consists of about 21 nucleotides, each having a 2-nucleotide 3′-terminal nucleotide overhang, and wherein the duplex has about 19 base pairs. In another embodiment, a siNA molecule of the invention comprises a single stranded hairpin structure, wherein the siNA is about 36 to about 70 (e.g., about 36, 40, 45, 50, 55, 60, 65, or 70) nucleotides in length having about 15 to about 30 (e.g., about 15, 16, 17, 18, 19, 20, 21, 22, 23, 24, 25, 26, 27, 28, 29, or 30) base pairs, and wherein the siNA can include a chemical modification comprising a structure having any of Formulae I-VII or any combination thereof. For example, an exemplary chemically-modified siNA molecule of the invention comprises a linear oligonucleotide having about 42 to about 50 (e.g., about 42, 43, 44, 45, 46, 47, 48, 49, or 50) nucleotides that is chemically-modified with a chemical modification having any of Formulae I-VII or any combination thereof, wherein the linear oligonucleotide forms a hairpin structure having about 19 to about 21 (e.g., 19, 20, or 21) base pairs and a 2-nucleotide 3′-terminal nucleotide overhang. In another embodiment, a linear hairpin siNA molecule of the invention contains a stem loop motif, wherein the loop portion of the siNA molecule is biodegradable. For example, a linear hairpin siNA molecule of the invention is designed such that degradation of the loop portion of the siNA molecule in vivo can generate a double-stranded siNA molecule with 3′-terminal overhangs, such as 3′-terminal nucleotide overhangs comprising about 2 nucleotides.

[0092] In another embodiment, a siNA molecule of the invention comprises a hairpin structure, wherein the siNA is about 25 to about 50 (e.g., about 25, 26, 27, 28, 29, 30, 31, 32, 33, 34, 35, 36, 37, 38, 39, 40, 41, 42, 43, 44, 45, 46, 47, 48, 49, or 50) nucleotides in length having about 3 to about 25 (e.g., about 3, 4, 5, 6, 7, 8, 9, 10, 11, 12, 13, 14, 15, 16, 17, 18, 19, 20, 21, 22, 23, 24, or 25) base pairs, and wherein the siNA can include one or more chemical modifications comprising a structure having any of Formulae I-VII or any combination thereof. For example, an exemplary chemically-modified siNA molecule of the invention comprises a linear oligonucleotide having about 25 to about 35 (e.g., about 25, 26, 27, 28, 29, 30, 31, 32, 33, 34, or 35) nucleotides that is chemically-modified with one or more chemical modifications having any of Formulae I-VII or any combination thereof, wherein the linear oligonucleotide forms a hairpin structure having about 3 to about 25 (e.g., about 3, 4, 5, 6, 7, 8, 9, 10, 11, 12, 13, 14, 15, 16, 17, 18, 19, 20, 21, 22, 23, 24, or 25) base pairs and a 5′-terminal phosphate group that can be chemically modified as described herein (for example a 5′-terminal phosphate group having Formula IV). In another embodiment, a linear hairpin siNA molecule of the invention contains a stem loop motif, wherein the loop portion of the siNA molecule is biodegradable. In one embodiment, a linear hairpin siNA molecule of the invention comprises a loop portion comprising a non-nucleotide linker.

[0093] In another embodiment, a siNA molecule of the invention comprises an asymmetric hairpin structure, wherein the siNA is about 25 to about 50 (e.g., about 25, 26, 27, 28, 29, 30, 31, 32, 33, 34, 35, 36, 37, 38, 39, 40, 41, 42, 43, 44, 45, 46, 47, 48, 49, or 50) nucleotides in length having about 3 to about 25 (e.g., about 3, 4, 5, 6, 7, 8, 9, 10, 11, 12, 13, 14, 15, 16, 17, 18, 19, 20, 21, 22, 23, 24, or 25) base pairs, and wherein the siNA can include one or more chemical modifications comprising a structure having any of Formulae I-VII or any combination thereof. For example, an exemplary chemically-modified siNA molecule of the invention comprises a linear oligonucleotide having about 25 to about 35 (e.g., about 25, 26, 27, 28, 29, 30, 31, 32, 33, 34, or 35) nucleotides that is chemically-modified with one or more chemical modifications having any of Formulae I-VII or any combination thereof, wherein the linear oligonucleotide forms an asymmetric hairpin structure having about 3 to about 25 (e.g., about 3, 4, 5, 6, 7, 8, 9, 10, 11, 12, 13, 14, 15, 16, 17, 18, 19, 20, 21, 22, 23, 24, or 25) base pairs and a 5′-terminal phosphate group that can be chemically modified as described herein (for example a 5′-terminal phosphate group having Formula IV). In one embodiment, an asymmetric hairpin siNA molecule of the invention contains a stem loop motif, wherein the loop portion of the siNA molecule is biodegradable. In another embodiment, an asymmetric hairpin siNA molecule of the invention comprises a loop portion comprising a non-nucleotide linker.

[0094] In another embodiment, a siNA molecule of the invention comprises an asymmetric double stranded structure having separate polynucleotide strands comprising sense and antisense regions, wherein the antisense region is about 15 to about 30 (e.g., about 15, 16, 17, 18, 19, 20, 21, 22, 23, 24, 25, 26, 27, 28, 29, or 30) nucleotides in length, wherein the sense region is about 3 to about 25 (e.g., about 3, 4, 5, 6, 7, 8, 9, 10, 11, 12, 13, 14, 15, 16, 17, 18, 19, 20, 21, 22, 23, 24, or 25) nucleotides in length, wherein the sense region and the antisense region have at least 3 complementary nucleotides, and wherein the siNA can include one or more chemical modifications comprising a structure having any of Formulae I-VII or any combination thereof. For example, an exemplary chemically-modified siNA molecule of the invention comprises an asymmetric double stranded structure having separate polynucleotide strands comprising sense and antisense regions, wherein the antisense region is about 18 to about 23 (e.g., about 18, 19, 20, 21, 22, or 23) nucleotides in length and wherein the sense region is about 3 to about 15 (e.g., about 3, 4, 5, 6, 7, 8, 9, 10, 11, 12, 13, 14, or 15) nucleotides in length, wherein the sense region the antisense region have at least 3 complementary nucleotides, and wherein the siNA can include one or more chemical modifications comprising a structure having any of Formulae I-VII or any combination thereof. In another embodiment, the asymmetric double stranded siNA molecule can also have a 5′-terminal phosphate group that can be chemically modified as described herein (for example a 5′-terminal phosphate group having Formula IV).

[0095] In another embodiment, a siNA molecule of the invention comprises a circular nucleic acid molecule, wherein the siNA is about 38 to about 70 (e.g., about 38, 40, 45, 50, 55, 60, 65, or 70) nucleotides in length having about 15 to about 30 (e.g., about 15, 16, 17, 18, 19, 20, 21, 22, 23, 24, 25, 26, 27, 28, 29, or 30) base pairs, and wherein the siNA can include a chemical modification, which comprises a structure having any of Formulae I-VII or any combination thereof. For example, an exemplary chemically-modified siNA molecule of the invention comprises a circular oligonucleotide having about 42 to about 50 (e.g., about 42, 43, 44, 45, 46, 47, 48, 49, or 50) nucleotides that is chemically-modified with a chemical modification having any of Formulae I-VII or any combination thereof, wherein the circular oligonucleotide forms a dumbbell shaped structure having about 19 base pairs and 2 loops.

[0096] In another embodiment, a circular siNA molecule of the invention contains two loop motifs, wherein one or both loop portions of the siNA molecule is biodegradable. For example, a circular siNA molecule of the invention is designed such that degradation of the loop portions of the siNA molecule in vivo can generate a double-stranded siNA molecule with 3′-terminal overhangs, such as 3′-terminal nucleotide overhangs comprising about 2 nucleotides.

[0097] In one embodiment, a siNA molecule of the invention comprises at least one (e.g., about 1, 2, 3, 4, 5, 6, 7, 8, 9, 10, or more) abasic moiety, for example a compound having Formula V: [chemical structure]
wherein each R3, R4, R5, R6, R7, R8, R10, R11, R12, and R13 is independently H, OH, alkyl, substituted alkyl, alkaryl or aralkyl, F, Cl, Br, CN, CF3, OCF3, OCN, O-alkyl, S-alkyl, N-alkyl, O-alkenyl, S-alkenyl, N-alkenyl, SO-alkyl, alkyl-OSH, alkyl-OH, O-alkyl-OH, O-alkyl-SH, S-alkyl-OH, S-alkyl-SH, alkyl-S-alkyl, alkyl-O-alkyl, ONO2, NO₂, N3, NH2, aminoalkyl, aminoacid, aminoacyl, ONH2, O-aminoalkyl, O-aminoacid, O-aminoacyl, heterocycloalkyl, heterocycloalkaryl, aminoalkylamino, polyalklylamino, substituted silyl, or group having Formula I or II; R9 is O, S, CH2, S═O, CHF, or CF2.

[0098] In one embodiment, a siNA molecule of the invention comprises at least one (e.g., about 1, 2, 3, 4, 5, 6, 7, 8, 9, 10, or more) inverted abasic moiety, for example a compound having Formula VI: [chemical structure]
wherein each R3, R4, R5, R6, R7, R8, R10, R11, R12, and R13 is independently H, OH, alkyl, substituted alkyl, alkaryl or aralkyl, F, Cl, Br, CN, CF3, OCF3, OCN, O-alkyl, S-alkyl, N-alkyl, O-alkenyl, S-alkenyl, N-alkenyl, SO-alkyl, alkyl-OSH, alkyl-OH, O-alkyl-OH, O-alkyl-SH, S-alkyl-OH, S-alkyl-SH, alkyl-S-alkyl, alkyl-O-alkyl, ONO2, NO2, N3, NH2, aminoalkyl, aminoacid, aminoacyl, ONH2, O-aminoalkyl, O-aminoacid, O-aminoacyl, heterocycloalkyl, heterocycloalkaryl, aminoalkylamino, polyalklylamino, substituted silyl, or group having Formula I or II; R9 is O, S, CH2, S═O, CHF, or CF2, and either R2, R3, R8 or R1 3 serve as points of attachment to the siNA molecule of the invention.

[0099] In another embodiment, a siNA molecule of the invention comprises at least one (e.g., about 1, 2, 3, 4, 5, 6, 7, 8, 9, 10, or more) substituted polyalkyl moieties, for example a compound having Formula VII: [chemical structure]
wherein each n is independently an integer from 1 to 12, each R1, R2 and R3 is independently H, OH, alkyl, substituted alkyl, alkaryl or aralkyl, F, Cl, Br, CN, CF3, OCF3, OCN, O-alkyl, S-alkyl, N-alkyl, O-alkenyl, S-alkenyl, N-alkenyl, SO-alkyl, alkyl-OSH, alkyl-OH, O-alkyl-OH, O-alkyl-SH, S-alkyl-OH, S-alkyl-SH, alkyl-S-alkyl, alkyl-O-alkyl, ONO2, NO₂, N3, NH2, aminoalkyl, aminoacid, aminoacyl, ONH2, O-aminoalkyl, O-aminoacid, O-aminoacyl, heterocycloalkyl, heterocycloalkaryl, aminoalkylamino, polyalklylamino, substituted silyl, or a group having Formula I, and R1, R2 or R3 serves as points of attachment to the siNA molecule of the invention.

[0100] In another embodiment, the invention features a compound having Formula VII, wherein R1 and R2 are hydroxyl (OH) groups, n=1, and R3 comprises 0 and is the point of attachment to the 3′-end, the 5′-end, or both of the 3′ and 5′-ends of one or both strands of a double-stranded siNA molecule of the invention or to a single-stranded siNA molecule of the invention. This modification is referred to herein as “glyceryl” (for example modification 6 in FIG. 10).

[0101] In another embodiment, a chemically modified nucleoside or non-nucleoside (e.g. a moiety having any of Formula V, VI or VII) of the invention is at the 3′-end, the 5′-end, or both of the 3′ and 5′-ends of a siNA molecule of the invention. For example, chemically modified nucleoside or non-nucleoside (e.g., a moiety having Formula V, VI or VII) can be present at the 3′-end, the 5′-end, or both of the 3′ and 5′-ends of the antisense strand, the sense strand, or both antisense and sense strands of the siNA molecule. In one embodiment, the chemically modified nucleoside or non-nucleoside (e.g., a moiety having Formula V, VI or VII) is present at the 5′-end and 3′-end of the sense strand and the 3′-end of the antisense strand of a double stranded siNA molecule of the invention. In one embodiment, the chemically modified nucleoside or non-nucleoside (e.g., a moiety having Formula V, VI or VII) is present at the terminal position of the 5′-end and 3′-end of the sense strand and the 3′-end of the antisense strand of a double stranded siNA molecule of the invention. In one embodiment, the chemically modified nucleoside or non-nucleoside (e.g., a moiety having Formula V, VI or VII) is present at the two terminal positions of the 5′-end and 3′-end of the sense strand and the 3′-end of the antisense strand of a double stranded siNA molecule of the invention. In one embodiment, the chemically modified nucleoside or non-nucleoside (e.g., a moiety having Formula V, VI or VII) is present at the penultimate position of the 5′-end and 3′-end of the sense strand and the 3′-end of the antisense strand of a double stranded siNA molecule of the invention. In addition, a moiety having Formula VII can be present at the 3′-end or the 5′-end of a hairpin siNA molecule as described herein.

[0102] In another embodiment, a siNA molecule of the invention comprises an abasic residue having Formula V or VI, wherein the abasic residue having Formula VI or VI is connected to the siNA construct in a 3′-3′,3′-2′,2′-3′, or 5′-5′ configuration, such as at the 3′-end, the 5′-end, or both of the 3′ and 5′-ends of one or both siNA strands.

[0103] In one embodiment, a siNA molecule of the invention comprises one or more (e.g., about 1, 2, 3, 4, 5, 6, 7, 8, 9, 10, or more) locked nucleic acid (LNA) nucleotides, for example, at the 5′-end, the 3′-end, both of the 5′ and 3′-ends, or any combination thereof, of the siNA molecule.

[0104] In another embodiment, a siNA molecule of the invention comprises one or more (e.g., about 1, 2, 3, 4, 5, 6, 7, 8, 9, 10, or more) acyclic nucleotides, for example, at the 5′-end, the 3′-end, both of the S′ and 3′-ends, or any combination thereof, of the siNA molecule.

[0105] In one embodiment, the invention features a chemically-modified short interfering nucleic acid (siNA) molecule of the invention comprising a sense region, wherein any (e.g., one or more or all) pyrimidine nucleotides present in the sense region are 2′-deoxy-2′-fluoro pyrimidine nucleotides (e.g., wherein all pyrimidine nucleotides are 2′-deoxy-2′-fluoro pyrimidine nucleotides or alternately a plurality of pyrimidine nucleotides are 2′-deoxy-2′-fluoro pyrimidine nucleotides), and wherein any (e.g., one or more or all) purine nucleotides present in the sense region are 2′-deoxy purine nucleotides (e.g., wherein all purine nucleotides are 2′-deoxy purine nucleotides or alternately a plurality of purine nucleotides are 2′-deoxy purine nucleotides).

[0106] In one embodiment, the invention features a chemically-modified short interfering nucleic acid (siNA) molecule of the invention comprising a sense region, wherein any (e.g., one or more or all) pyrimidine nucleotides present in the sense region are 2′-deoxy-2′-fluoro pyrimidine nucleotides (e.g., wherein all pyrimidine nucleotides are 2′-deoxy-2′-fluoro pyrimidine nucleotides or alternately a plurality of pyrimidine nucleotides are 2′-deoxy-2′-fluoro pyrimidine nucleotides), and wherein any (e.g., one or more or all) purine nucleotides present in the sense region are 2′-deoxy purine nucleotides (e.g., wherein all purine nucleotides are 2′-deoxy purine nucleotides or alternately a plurality of purine nucleotides are 2′-deoxy purine nucleotides), wherein any nucleotides comprising a 3′-terminal nucleotide overhang that are present in said sense region are 2′-deoxy nucleotides.

[0107] In one embodiment, the invention features a chemically-modified short interfering nucleic acid (siNA) molecule of the invention comprising a sense region, wherein any (e.g., one or more or all) pyrimidine nucleotides present in the sense region are 2′-deoxy-2′-fluoro pyrimidine nucleotides (e.g., wherein all pyrimidine nucleotides are 2′-deoxy-2′-fluoro pyrimidine nucleotides or alternately a plurality of pyrimidine nucleotides are 2′-deoxy-2′-fluoro pyrimidine nucleotides), and wherein any (e.g., one or more or all) purine nucleotides present in the sense region are 2′-O-methyl purine nucleotides (e.g., wherein all purine nucleotides are 2′-O-methyl purine nucleotides or alternately a plurality of purine nucleotides are 2′-O-methyl purine nucleotides).

[0108] In one embodiment, the invention features a chemically-modified short interfering nucleic acid (siNA) molecule of the invention comprising a sense region, wherein any (e.g., one or more or all) pyrimidine nucleotides present in the sense region are 2′-deoxy-2′-fluoro pyrimidine nucleotides (e.g., wherein all pyrimidine nucleotides are 2′-deoxy-2′-fluoro pyrimidine nucleotides or alternately a plurality of pyrimidine nucleotides are 2′-deoxy-2′-fluoro pyrimidine nucleotides), wherein any (e.g., one or more or all) purine nucleotides present in the sense region are 2′-O-methyl purine nucleotides (e.g., wherein all purine nucleotides are 2′-O-methyl purine nucleotides or alternately a plurality of purine nucleotides are 2′-O-methyl purine nucleotides), and wherein any nucleotides comprising a 3′-terminal nucleotide overhang that are present in said sense region are 2′-deoxy nucleotides.

[0109] In one embodiment, the invention features a chemically-modified short interfering nucleic acid (siNA) molecule of the invention comprising an antisense region, wherein any (e.g., one or more or all) pyrimidine nucleotides present in the antisense region are 2′-deoxy-2′-fluoro pyrimidine nucleotides (e.g., wherein all pyrimidine nucleotides are 2′-deoxy-2′-fluoro pyrimidine nucleotides or alternately a plurality of pyrimidine nucleotides are 2′-deoxy-2′-fluoro pyrimidine nucleotides), and wherein any (e.g., one or more or all) purine nucleotides present in the antisense region are 2′-O-methyl purine nucleotides (e.g., wherein all purine nucleotides are 2′-O-methyl purine nucleotides or alternately a plurality of purine nucleotides are 2′-O-methyl purine nucleotides).

[0110] In one embodiment, the invention features a chemically-modified short interfering nucleic acid (siNA) molecule of the invention comprising an antisense region, wherein any (e.g., one or more or all) pyrimidine nucleotides present in the antisense region are 2′-deoxy-2′-fluoro pyrimidine nucleotides (e.g., wherein all pyrimidine nucleotides are 2′-deoxy-2′-fluoro pyrimidine nucleotides or alternately a plurality of pyrimidine nucleotides are 2′-deoxy-2′-fluoro pyrimidine nucleotides), wherein any (e.g., one or more or all) purine nucleotides present in the antisense region are 2′-O-methyl purine nucleotides (e.g., wherein all purine nucleotides are 2′-O-methyl purine nucleotides or alternately a plurality of purine nucleotides are 2′-O-methyl purine nucleotides), and wherein any nucleotides comprising a 3′-terminal nucleotide overhang that are present in said antisense region are 2′-deoxy nucleotides.

[0111] In one embodiment, the invention features a chemically-modified short interfering nucleic acid (siNA) molecule of the invention comprising an antisense region, wherein any (e.g., one or more or all) pyrimidine nucleotides present in the antisense region are 2′-deoxy-2′-fluoro pyrimidine nucleotides (e.g., wherein all pyrimidine nucleotides are 2′-deoxy-2′-fluoro pyrimidine nucleotides or alternately a plurality of pyrimidine nucleotides are 2′-deoxy-2′-fluoro pyrimidine nucleotides), and wherein any (e.g., one or more or all) purine nucleotides present in the antisense region are 2′-deoxy purine nucleotides (e.g., wherein all purine nucleotides are 2′-deoxy purine nucleotides or alternately a plurality of purine nucleotides are 2′-deoxy purine nucleotides).

[0112] In one embodiment, the invention features a chemically-modified short interfering nucleic acid (siNA) molecule of the invention comprising an antisense region, wherein any (e.g., one or more or all) pyrimidine nucleotides present in the antisense region are 2′-deoxy-2′-fluoro pyrimidine nucleotides (e.g., wherein all pyrimidine nucleotides are 2′-deoxy-2′-fluoro pyrimidine nucleotides or alternately a plurality of pyrimidine nucleotides are 2′-deoxy-2′-fluoro pyrimidine nucleotides), and wherein any (e.g., one or more or all) purine nucleotides present in the antisense region are 2′-O-methyl purine nucleotides (e.g., wherein all purine nucleotides are 2′-O-methyl purine nucleotides or alternately a plurality of purine nucleotides are 2′-O-methyl purine nucleotides).

[0113] In one embodiment, the invention features a chemically-modified short interfering nucleic acid (siNA) molecule of the invention capable of mediating RNA interference (RNAi) against HCV inside a cell or reconstituted in vitro system comprising a sense region, wherein one or more pyrimidine nucleotides present in the sense region are 2′-deoxy-2′-fluoro pyrimidine nucleotides (e.g., wherein all pyrimidine nucleotides are 2′-deoxy-2′-fluoro pyrimidine nucleotides or alternately a plurality of pyrimidine nucleotides are 2′-deoxy-2′-fluoro pyrimidine nucleotides), and one or more purine nucleotides present in the sense region are 2′-deoxy purine nucleotides (e.g., wherein all purine nucleotides are 2′-deoxy purine nucleotides or alternately a plurality of purine nucleotides are 2′-deoxy purine nucleotides), and an antisense region, wherein one or more pyrimidine nucleotides present in the antisense region are 2′-deoxy-2′-fluoro pyrimidine nucleotides (e.g., wherein all pyrimidine nucleotides are 2′-deoxy-2′-fluoro pyrimidine nucleotides or alternately a plurality of pyrimidine nucleotides are 2′-deoxy-2′-fluoro pyrimidine nucleotides), and one or more purine nucleotides present in the antisense region are 2′-O-methyl purine nucleotides (e.g., wherein all purine nucleotides are 2′-O-methyl purine nucleotides or alternately a plurality of purine nucleotides are 2′-O-methyl purine nucleotides). The sense region and/or the antisense region can have a terminal cap modification, such as any modification described herein or shown in FIG. 10, that is optionally present at the 3′-end, the 5′-end, or both of the 3′ and 5′-ends of the sense and/or antisense sequence. The sense and/or antisense region can optionally further comprise a 3′-terminal nucleotide overhang having about 1 to about 4 (e.g., about 1, 2, 3, or 4) 2′-deoxynucleotides. The overhang nucleotides can further comprise one or more (e.g., about 1, 2, 3, 4 or more) phosphorothioate, phosphonoacetate, and/or thiophosphonoacetate internucleotide linkages. Non-limiting examples of these chemically-modified siNAs are shown in FIGS. 4 and 5 and Tables III and IV herein. In any of these described embodiments, the purine nucleotides present in the sense region are alternatively 2′-O-methyl purine nucleotides (e.g., wherein all purine nucleotides are 2′-O-methyl purine nucleotides or alternately a plurality of purine nucleotides are 2′-O-methyl purine nucleotides) and one or more purine nucleotides present in the antisense region are 2′-O-methyl purine nucleotides (e.g., wherein all purine nucleotides are 2′-O-methyl purine nucleotides or alternately a plurality of purine nucleotides are 2′-O-methyl purine nucleotides). Also, in any of these embodiments, one or more purine nucleotides present in the sense region are alternatively purine ribonucleotides (e.g., wherein all purine nucleotides are purine ribonucleotides or alternately a plurality of purine nucleotides are purine ribonucleotides) and any purine nucleotides present in the antisense region are 2′-O-methyl purine nucleotides (e.g., wherein all purine nucleotides are 2′-O-methyl purine nucleotides or alternately a plurality of purine nucleotides are 2′-O-methyl purine nucleotides). Additionally, in any of these embodiments, one or more purine nucleotides present in the sense region and/or present in the antisense region are alternatively selected from the group consisting of 2′-deoxy nucleotides, locked nucleic acid (LNA) nucleotides, 2′-methoxyethyl nucleotides, 4′-thionucleotides, and 2′-O-methyl nucleotides (e.g., wherein all purine nucleotides are selected from the group consisting of 2′-deoxy nucleotides, locked nucleic acid (LNA) nucleotides, 2′-methoxyethyl nucleotides, 4′-thionucleotides, and 2′-O-methyl nucleotides or alternately a plurality of purine nucleotides are selected from the group consisting of 2′-deoxy nucleotides, locked nucleic acid (LNA) nucleotides, 2′-methoxyethyl nucleotides, 4′-thionucleotides, and 2′-O-methyl nucleotides).

[0114] In another embodiment, any modified nucleotides present in the siNA molecules of the invention, preferably in the antisense strand of the siNA molecules of the invention, but also optionally in the sense and/or both antisense and sense strands, comprise modified nucleotides having properties or characteristics similar to naturally occurring ribonucleotides. For example, the invention features siNA molecules including modified nucleotides having a Northern conformation (e.g., Northern pseudorotation cycle, see for example Saenger, Principles of Nucleic Acid Structure, Springer-Verlag ed., 1984). As such, chemically modified nucleotides present in the siNA molecules of the invention, preferably in the antisense strand of the siNA molecules of the invention, but also optionally in the sense and/or both antisense and sense strands, are resistant to nuclease degradation while at the same time maintaining the capacity to mediate RNAi. Non-limiting examples of nucleotides having a northern configuration include locked nucleic acid (LNA) nucleotides (e.g., 2′-O, 4′-C-methylene-(D-ribofuranosyl) nucleotides); 2′-methoxyethoxy (MOE) nucleotides; 2′-methyl-thio-ethyl, 2′-deoxy-2′-fluoro nucleotides, 2′-deoxy-2′-chloro nucleotides, 2′-azido nucleotides, and 2′-O-methyl nucleotides.

[0115] In one embodiment, the sense strand of a double stranded siNA molecule of the invention comprises a terminal cap moiety, (see for example FIG. 10) such as an inverted deoxyabaisc moiety, at the 3′-end, 5′-end, or both 3′ and 5′-ends of the sense strand.

[0116] In one embodiment, the invention features a chemically-modified short interfering nucleic acid molecule (siNA) capable of mediating RNA interference (RNAi) against HCV inside a cell or reconstituted in vitro system, wherein the chemical modification comprises a conjugate covalently attached to the chemically-modified siNA molecule. Non-limiting examples of conjugates contemplated by the invention include conjugates and ligands described in Vargeese et al., U.S. Ser. No. 10/427,160, filed Apr. 30, 2003, incorporated by reference herein in its entirety, including the drawings. In another embodiment, the conjugate is covalently attached to the chemically-modified siNA molecule via a biodegradable linker. In one embodiment, the conjugate molecule is attached at the 3′-end of either the sense strand, the antisense strand, or both strands of the chemically-modified siNA molecule. In another embodiment, the conjugate molecule is attached at the 5′-end of either the sense strand, the antisense strand, or both strands of the chemically-modified siNA molecule. In yet another embodiment, the conjugate molecule is attached both the 3′-end and 5′-end of either the sense strand, the antisense strand, or both strands of the chemically-modified siNA molecule, or any combination thereof. In one embodiment, a conjugate molecule of the invention comprises a molecule that facilitates delivery of a chemically-modified siNA molecule into a biological system, such as a cell. In another embodiment, the conjugate molecule attached to the chemically-modified siNA molecule is a polyethylene glycol, human serum albumin, or a ligand for a cellular receptor that can mediate cellular uptake. Examples of specific conjugate molecules contemplated by the instant invention that can be attached to chemically-modified siNA molecules are described in Vargeese et al., U.S. Ser. No. 10/201,394, filed Jul. 22, 2002 incorporated by reference herein. The type of conjugates used and the extent of conjugation of siNA molecules of the invention can be evaluated for improved pharmacokinetic profiles, bioavailability, and/or stability of siNA constructs while at the same time maintaining the ability of the siNA to mediate RNAi activity. As such, one skilled in the art can screen siNA constructs that are modified with various conjugates to determine whether the siNA conjugate complex possesses improved properties while maintaining the ability to mediate RNAi, for example in animal models as are generally known in the art.

[0117] In one embodiment, the invention features a short interfering nucleic acid (siNA) molecule of the invention, wherein the siNA further comprises a nucleotide, non-nucleotide, or mixed nucleotide/non-nucleotide linker that joins the sense region of the siNA to the antisense region of the siNA. In one embodiment, a nucleotide linker of the invention can be a linker of ≧2 nucleotides in length, for example about 3, 4, 5, 6, 7, 8, 9, or 10 nucleotides in length. In another embodiment, the nucleotide linker can be a nucleic acid aptamer. By “aptamer” or “nucleic acid aptamer” as used herein is meant a nucleic acid molecule that binds specifically to a target molecule wherein the nucleic acid molecule has sequence that comprises a sequence recognized by the target molecule in its natural setting. Alternately, an aptamer can be a nucleic acid molecule that binds to a target molecule where the target molecule does not naturally bind to a nucleic acid. The target molecule can be any molecule of interest. For example, the aptamer can be used to bind to a ligand-binding domain of a protein, thereby preventing interaction of the naturally occurring ligand with the protein. This is a non-limiting example and those in the art will recognize that other embodiments can be readily generated using techniques generally known in the art. (See, for example, Gold et al., 1995, Annu. Rev. Biochem., 64, 763; Brody and Gold, 2000, J. Biotechnol., 74, 5; Sun, 2000, Curr. Opin. Mol. Ther., 2, 100; Kusser, 2000, J. Biotechnol., 74, 27; Hermann and Patel, 2000, Science, 287, 820; and Jayasena, 1999, Clinical Chemistry, 45, 1628.)

[0118] In yet another embodiment, a non-nucleotide linker of the invention comprises abasic nucleotide, polyether, polyamine, polyamide, peptide, carbohydrate, lipid, polyhydrocarbon, or other polymeric compounds (e.g. polyethylene glycols such as those having between 2 and 100 ethylene glycol units). Specific examples include those described by Seela and Kaiser, Nucleic Acids Res. 1990, 18:6353 and Nucleic Acids Res. 1987, 15:3113; Cload and Schepartz, J. Am. Chem. Soc. 1991, 113:6324; Richardson and Schepartz, J. Am. Chem. Soc. 1991, 113:5109; Ma et al., Nucleic Acids Res. 1993, 21:2585 and Biochemistry 1993, 32:1751; Durand et al., Nucleic Acids Res. 1990, 18:6353; McCurdy et al., Nucleosides & Nucleotides 1991, 10:287; Jschke et al., Tetrahedron Lett. 1993, 34:301; Ono et al., Biochemistry 1991, 30:9914; Arnold et al., International Publication No. WO 89/02439; Usman et al., International Publication No. WO 95/06731; Dudycz et al., International Publication No. WO 95/11910 and Ferentz and Verdine, J. Am. Chem. Soc. 1991, 113:4000, all hereby incorporated by reference herein. A “non-nucleotide” further means any group or compound that can be incorporated into a nucleic acid chain in the place of one or more nucleotide units, including either sugar and/or phosphate substitutions, and allows the remaining bases to exhibit their enzymatic activity. The group or compound can be abasic in that it does not contain a commonly recognized nucleotide base, such as adenosine, guanine, cytosine, uracil or thymine, for example at the C1 position of the sugar.

[0119] In one embodiment, the invention features a short interfering nucleic acid (siNA) molecule capable of mediating RNA interference (RNAi) inside a cell or reconstituted in vitro system, wherein one or both strands of the siNA molecule that are assembled from two separate oligonucleotides do not comprise any ribonucleotides. For example, a siNA molecule can be assembled from a single oligonculeotide where the sense and antisense regions of the siNA comprise separate oligonucleotides that do not have any ribonucleotides (e.g., nucleotides having a 2′-OH group) present in the oligonucleotides. In another example, a siNA molecule can be assembled from a single oligonculeotide where the sense and antisense regions of the siNA are linked or circularized by a nucleotide or non-nucleotide linker as described herein, wherein the oligonucleotide does not have any ribonucleotides (e.g., nucleotides having a 2′-OH group) present in the oligonucleotide. Applicant has surprisingly found that the presense of ribonucleotides (e.g., nucleotides having a 2′-hydroxyl group) within the siNA molecule is not required or essential to support RNAi activity. As such, in one embodiment, all positions within the siNA can include chemically modified nucleotides and/or non-nucleotides such as nucleotides and or non-nucleotides having Formula I, II, III, IV, V, VI, or VII or any combination thereof to the extent that the ability of the siNA molecule to support RNAi activity in a cell is maintained.

[0120] In one embodiment, a siNA molecule of the invention is a single stranded siNA molecule that mediates RNAi activity in a cell or reconstituted in vitro system comprising a single stranded polynucleotide having complementarity to a target nucleic acid sequence. In another embodiment, the single stranded siNA molecule of the invention comprises a 5′-terminal phosphate group. In another embodiment, the single stranded siNA molecule of the invention comprises a 5′-terminal phosphate group and a 3′-terminal phosphate group (e.g., a 2′,3′-cyclic phosphate). In another embodiment, the single stranded siNA molecule of the invention comprises about 15 to about 30 (e.g., about 15, 16, 17, 18, 19, 20, 21, 22, 23, 24, 25, 26, 27, 28, 29, or 30) nucleotides. In yet another embodiment, the single stranded siNA molecule of the invention comprises one or more chemically modified nucleotides or non-nucleotides described herein. For example, all the positions within the siNA molecule can include chemically-modified nucleotides such as nucleotides having any of Formulae I-VII, or any combination thereof to the extent that the ability of the siNA molecule to support RNAi activity in a cell is maintained.

[0121] In one embodiment, a siNA molecule of the invention is a single stranded siNA molecule that mediates RNAi activity in a cell or reconstituted in vitro system comprising a single stranded polynucleotide having complementarity to a target nucleic acid sequence, wherein one or more pyrimidine nucleotides present in the siNA are 2′-deoxy-2′-fluoro pyrimidine nucleotides (e.g., wherein all pyrimidine nucleotides are 2′-deoxy-2′-fluoro pyrimidine nucleotides or alternately a plurality of pyrimidine nucleotides are 2′-deoxy-2′-fluoro pyrimidine nucleotides), and wherein any purine nucleotides present in the antisense region are 2′-O-methyl purine nucleotides (e.g., wherein all purine nucleotides are 2′-O-methyl purine nucleotides or alternately a plurality of purine nucleotides are 2′-O-methyl purine nucleotides), and a terminal cap modification, such as any modification described herein or shown in FIG. 10, that is optionally present at the 3′-end, the 5′-end, or both of the 3′ and 5′-ends of the antisense sequence. The siNA optionally further comprises about 1 to about 4 or more (e.g., about 1, 2, 3, 4 or more) terminal 2′-deoxynucleotides at the 3′-end of the siNA molecule, wherein the terminal nucleotides can further comprise one or more (e.g., 1, 2, 3, 4 or more) phosphorothioate, phosphonoacetate, and/or thiophosphonoacetate internucleotide linkages, and wherein the siNA optionally further comprises a terminal phosphate group, such as a 5′-terminal phosphate group. In any of these embodiments, any purine nucleotides present in the antisense region are alternatively 2′-deoxy purine nucleotides (e.g., wherein all purine nucleotides are 2′-deoxy purine nucleotides or alternately a plurality of purine nucleotides are 2′-deoxy purine nucleotides). Also, in any of these embodiments, any purine nucleotides present in the siNA (i.e., purine nucleotides present in the sense and/or antisense region) can alternatively be locked nucleic acid (LNA) nucleotides (e.g., wherein all purine nucleotides are LNA nucleotides or alternately a plurality of purine nucleotides are LNA nucleotides). Also, in any of these embodiments, any purine nucleotides present in the siNA are alternatively 2′-methoxyethyl purine nucleotides (e.g., wherein all purine nucleotides are 2′-methoxyethyl purine nucleotides or alternately a plurality of purine nucleotides are 2′-methoxyethyl purine nucleotides). In another embodiment, any modified nucleotides present in the single stranded siNA molecules of the invention comprise modified nucleotides having properties or characteristics similar to naturally occurring ribonucleotides. For example, the invention features siNA molecules including modified nucleotides having a Northern conformation (e.g., Northern pseudorotation cycle, see for example Saenger, Principles of Nucleic Acid Structure, Springer-Verlag ed., 1984). As such, chemically modified nucleotides present in the single stranded siNA molecules of the invention are preferably resistant to nuclease degradation while at the same time maintaining the capacity to mediate RNAi.

[0122] In one embodiment, a siNA molecule of the invention comprises chemically modified nucleotides or non-nucleotides (e.g., having any of Formulae I-VII, such as 2′-deoxy, 2′-deoxy-2′-fluoro, or 2′-O-methyl nucleotides) at alternating positions within one or more strands or regions of the siNA molecule. For example, such chemical modifications can be introduced at every other position of a RNA based siNA molecule, starting at either the first or second nucleotide from the 3′-end or 5′-end of the siNA. In a non-limiting example, a double stranded siNA molecule of the invention in which each strand of the siNA is 21 nucleotides in length is featured wherein positions 1, 3, 5, 7, 9, 11, 13, 15, 17, 19 and 21 of each strand are chemically modified (e.g., with compounds having any of Formulae 1-VII, such as such as 2′-deoxy, 2′-deoxy-2′-fluoro, or 2′-O-methyl nucleotides). In another non-limiting example, a double stranded siNA molecule of the invention in which each strand of the siNA is 21 nucleotides in length is featured wherein positions 2, 4, 6, 8, 10, 12, 14, 16, 18, and 20 of each strand are chemically modified (e.g., with compounds having any of Formulae 1-VII, such as such as 2′-deoxy, 2′-deoxy-2′-fluoro, or 2′-O-methyl nucleotides). Such siNA molecules can further comprise terminal cap moieties and/or backbone modifications as described herein.

[0123] In one embodiment, the invention features a method for modulating the expression of a HCV gene within a cell comprising: (a) synthesizing a siNA molecule of the invention, which can be chemically-modified, wherein one of the siNA strands comprises a sequence complementary to RNA of the HCV gene; and (b) introducing the siNA molecule into a cell under conditions suitable to modulate (e.g., inhibit) the expression of the HCV gene in the cell.

[0124] In one embodiment, the invention features a method for modulating the expression of a HCV gene within a cell comprising: (a) synthesizing a siNA molecule of the invention, which can be chemically-modified, wherein one of the siNA strands comprises a sequence complementary to RNA of the HCV gene and wherein the sense strand sequence of the siNA comprises a sequence identical or substantially similar to the sequence of the target RNA; and (b) introducing the siNA molecule into a cell under conditions suitable to modulate (e.g., inhibit) the expression of the HCV gene in the cell.

[0125] In another embodiment, the invention features a method for modulating the expression of more than one HCV gene within a cell comprising: (a) synthesizing siNA molecules of the invention, which can be chemically-modified, wherein one of the siNA strands comprises a sequence complementary to RNA of the HCV genes; and (b) introducing the siNA molecules into a cell under conditions suitable to modulate (e.g., inhibit) the expression of the HCV genes in the cell.

[0126] In another embodiment, the invention features a method for modulating the expression of two or more HCV genes within a cell comprising: (a) synthesizing one or more siNA molecules of the invention, which can be chemically-modified, wherein the siNA strands comprise sequences complementary to RNA of the HCV genes and wherein the sense strand sequences of the siNAs comprise sequences identical or substantially similar to the sequences of the target RNAs; and (b) introducing the siNA molecules into a cell under conditions suitable to modulate (e.g., inhibit) the expression of the HCV genes in the cell.

[0127] In another embodiment, the invention features a method for modulating the expression of more than one HCV gene within a cell comprising: (a) synthesizing a siNA molecule of the invention, which can be chemically-modified, wherein one of the siNA strands comprises a sequence complementary to RNA of the HCV gene and wherein the sense strand sequence of the siNA comprises a sequence identical or substantially similar to the sequences of the target RNAs; and (b) introducing the siNA molecule into a cell under conditions suitable to modulate (e.g., inhibit) the expression of the HCV genes in the cell.

[0128] In one embodiment, siNA molecules of the invention are used as reagents in ex vivo applications. For example, siNA reagents are introduced into tissue or cells that are transplanted into a subject for therapeutic effect. The cells and/or tissue can be derived from an organism or subject that later receives the explant, or can be derived from another organism or subject prior to transplantation. The siNA molecules can be used to modulate the expression of one or more genes in the cells or tissue, such that the cells or tissue obtain a desired phenotype or are able to perform a function when transplanted in vivo. In one embodiment, certain target cells from a patient are extracted. These extracted cells are contacted with siNAs targeting a specific nucleotide sequence within the cells under conditions suitable for uptake of the siNAs by these cells (e.g. using delivery reagents such as cationic lipids, liposomes and the like or using techniques such as electroporation to facilitate the delivery of siNAs into cells). The cells are then reintroduced back into the same patient or other patients. In one embodiment, the invention features a method of modulating the expression of a HCV gene in a tissue explant comprising: (a) synthesizing a siNA molecule of the invention, which can be chemically-modified, wherein one of the siNA strands comprises a sequence complementary to RNA of the HCV gene; and (b) introducing the siNA molecule into a cell of the tissue explant derived from a particular organism under conditions suitable to modulate (e.g., inhibit) the expression of the HCV gene in the tissue explant. In another embodiment, the method further comprises introducing the tissue explant back into the organism the tissue was derived from or into another organism under conditions suitable to modulate (e.g., inhibit) the expression of the HCV gene in that organism.

[0129] In one embodiment, the invention features a method of modulating the expression of a HCV gene in a tissue explant comprising: (a) synthesizing a siNA molecule of the invention, which can be chemically-modified, wherein one of the siNA strands comprises a sequence complementary to RNA of the HCV gene and wherein the sense strand sequence of the siNA comprises a sequence identical or substantially similar to the sequence of the target RNA; and (b) introducing the siNA molecule into a cell of the tissue explant derived from a particular organism under conditions suitable to modulate (e.g., inhibit) the expression of the HCV gene in the tissue explant. In another embodiment, the method further comprises introducing the tissue explant back into the organism the tissue was derived from or into another organism under conditions suitable to modulate (e.g., inhibit) the expression of the HCV gene in that organism.

[0130] In another embodiment, the invention features a method of modulating the expression of more than one HCV gene in a tissue explant comprising: (a) synthesizing siNA molecules of the invention, which can be chemically-modified, wherein one of the siNA strands comprises a sequence complementary to RNA of the HCV genes; and (b) introducing the siNA molecules into a cell of the tissue explant derived from a particular organism under conditions suitable to modulate (e.g., inhibit) the expression of the HCV genes in the tissue explant. In another embodiment, the method further comprises introducing the tissue explant back into the organism the tissue was derived from or into another organism under conditions suitable to modulate (e.g., inhibit) the expression of the HCV genes in that organism.

[0131] In one embodiment, the invention features a method of modulating the expression of a HCV gene in a subject or organism comprising: (a) synthesizing a siNA molecule of the invention, which can be chemically-modified, wherein one of the siNA strands comprises a sequence complementary to RNA of the HCV gene; and (b) introducing the siNA molecule into the subject or organism under conditions suitable to modulate (e.g., inhibit) the expression of the HCV gene in the subject or organism. The level of HCV protein or RNA can be determined using various methods well-known in the art.

[0132] In another embodiment, the invention features a method of modulating the expression of more than one HCV gene in a subject or organism comprising: (a) synthesizing siNA molecules of the invention, which can be chemically-modified, wherein one of the siNA strands comprises a sequence complementary to RNA of the HCV genes; and (b) introducing the siNA molecules into the subject or organism under conditions suitable to modulate (e.g., inhibit) the expression of the HCV genes in the subject or organism. The level of HCV protein or RNA can be determined as is known in the art.

[0133] In one embodiment, the invention features a method for modulating the expression of a HCV gene within a cell comprising: (a) synthesizing a siNA molecule of the invention, which can be chemically-modified, wherein the siNA comprises a single stranded sequence having complementarity to RNA of the HCV gene; and (b) introducing the siNA molecule into a cell under conditions suitable to modulate (e.g., inhibit) the expression of the HCV gene in the cell.

[0134] In another embodiment, the invention features a method for modulating the expression of more than one HCV gene within a cell comprising: (a) synthesizing siNA molecules of the invention, which can be chemically-modified, wherein the siNA comprises a single stranded sequence having complementarity to RNA of the HCV gene; and (b) contacting the cell in vitro or in vivo with the siNA molecule under conditions suitable to modulate (e.g., inhibit) the expression of the HCV genes in the cell.

[0135] In one embodiment, the invention features a method of modulating the expression of a HCV gene in a tissue explant (e.g., a liver transplant) comprising: (a) synthesizing a siNA molecule of the invention, which can be chemically-modified, wherein the siNA comprises a single stranded sequence having complementarity to RNA of the HCV gene; and (b) contacting a cell of the tissue explant derived from a particular subject or organism with the siNA molecule under conditions suitable to modulate (e.g., inhibit) the expression of the HCV gene in the tissue explant. In another embodiment, the method further comprises introducing the tissue explant back into the subject or organism the tissue was derived from or into another subject or organism under conditions suitable to modulate (e.g., inhibit) the expression of the HCV gene in that subject or organism.

[0136] In another embodiment, the invention features a method of modulating the expression of more than one HCV gene in a tissue explant (e.g., a liver transplant) comprising: (a) synthesizing siNA molecules of the invention, which can be chemically-modified, wherein the siNA comprises a single stranded sequence having complementarity to RNA of the HCV gene; and (b) introducing the siNA molecules into a cell of the tissue explant derived from a particular subject or organism under conditions suitable to modulate (e.g., inhibit) the expression of the HCV genes in the tissue explant. In another embodiment, the method further comprises introducing the tissue explant back into the subject or organism the tissue was derived from or into another subject or organism under conditions suitable to modulate (e.g., inhibit) the expression of the HCV genes in that subject or organism.

[0137] In one embodiment, the invention features a method of modulating the expression of a HCV gene in a subject or organism comprising: (a) synthesizing a siNA molecule of the invention, which can be chemically-modified, wherein the siNA comprises a single stranded sequence having complementarity to RNA of the HCV gene; and (b) introducing the siNA molecule into the subject or organism under conditions suitable to modulate (e.g., inhibit) the expression of the HCV gene in the subject or organism.

[0138] In another embodiment, the invention features a method of modulating the expression of more than one HCV gene in a subject or organism comprising: (a) synthesizing siNA molecules of the invention, which can be chemically-modified, wherein the siNA comprises a single stranded sequence having complementarity to RNA of the HCV gene; and (b) introducing the siNA molecules into the subject or organism under conditions suitable to modulate (e.g., inhibit) the expression of the HCV genes in the subject or organism.

[0139] In one embodiment, the invention features a method of modulating the expression of a HCV gene in a subject or organism comprising contacting the subject or organism with a siNA molecule of the invention under conditions suitable to modulate (e.g., inhibit) the expression of the HCV gene in the subject or organism.

[0140] In one embodiment, the invention features a method for treating or preventing HCV infection in a subject or organism comprising contacting the subject or organism with a siNA molecule of the invention under conditions suitable to modulate (e.g., inhibit) the expression of an inhibitor of HCV gene expression in the subject or organism.

[0141] In one embodiment, the invention features a method for treating or preventing liver failure in a subject or organism comprising contacting the subject or organism with a siNA molecule of the invention under conditions suitable to modulate (e.g., inhibit) the expression of an inhibitor of HCV gene expression in the subject or organism.

[0142] In one embodiment, the invention features a method for treating or preventing hepatocellular carcinoma in a subject or organism comprising contacting the subject or organism with a siNA molecule of the invention under conditions suitable to modulate (e.g., inhibit) the expression of an inhibitor of HCV gene expression in the subject or organism.

[0143] In one embodiment, the invention features a method for treating or preventing cirrhosis in a subject or organism comprising contacting the subject or organism with a siNA molecule of the invention under conditions suitable to modulate (e.g., inhibit) the expression of an inhibitor of HCV gene expression in the subject or organism.

[0144] In another embodiment, the invention features a method of modulating the expression of more than one HCV gene in a subject or organism comprising contacting the subject or organism with one or more siNA molecules of the invention under conditions suitable to modulate (e.g., inhibit) the expression of the HCV genes in the subject or organism.

[0145] The siNA molecules of the invention can be designed to down regulate or inhibit target (e.g., HCV) gene expression through RNAi targeting of a variety of RNA molecules. In one embodiment, the siNA molecules of the invention are used to target various RNAs corresponding to a target gene. Non-limiting examples of such RNAs include messenger RNA (mRNA), alternate RNA splice variants of target gene(s), post-transcriptionally modified RNA of target gene(s), pre-mRNA of target gene(s), and/or RNA templates. If alternate splicing produces a family of transcripts that are distinguished by usage of appropriate exons, the instant invention can be used to inhibit gene expression through the appropriate exons to specifically inhibit or to distinguish among the functions of gene family members. For example, a protein that contains an alternatively spliced transmembrane domain can be expressed in both membrane bound and secreted forms. Use of the invention to target the exon containing the transmembrane domain can be used to determine the functional consequences of pharmaceutical targeting of membrane bound as opposed to the secreted form of the protein. Non-limiting examples of applications of the invention relating to targeting these RNA molecules include therapeutic pharmaceutical applications, pharmaceutical discovery applications, molecular diagnostic and gene function applications, and gene mapping, for example using single nucleotide polymorphism mapping with siNA molecules of the invention. Such applications can be implemented using known gene sequences or from partial sequences available from an expressed sequence tag (EST).

[0146] In another embodiment, the siNA molecules of the invention are used to target conserved sequences corresponding to a gene family or gene families such as HCV family genes (e.g., all known HCV strains, groups of related HCV strains, or groups of divergent HCV strains). As such, siNA molecules targeting multiple HCV targets can provide increased therapeutic effect. In addition, siNA can be used to characterize pathways of gene function in a variety of applications. For example, the present invention can be used to inhibit the activity of target gene(s) in a pathway to determine the function of uncharacterized gene(s) in gene function analysis, mRNA function analysis, or translational analysis. The invention can be used to determine potential target gene pathways involved in various diseases and conditions toward pharmaceutical development. The invention can be used to understand pathways of gene expression involved in, for example proliferative diseases, disorders and conditions.

[0147] In one embodiment, siNA molecule(s) and/or methods of the invention are used to down regulate the expression of gene(s) that encode RNA referred to by Genbank Accession, for example, HCV genes encoding RNA sequence(s) referred to herein by Genbank Accession number, for example, Genbank Accession Nos. shown in Table I.

[0148] In one embodiment, the invention features a method comprising: (a) generating a library of siNA constructs having a predetermined complexity; and (b) assaying the siNA constructs of (a) above, under conditions suitable to determine RNAi target sites within the target RNA sequence. In one embodiment, the siNA molecules of (a) have strands of a fixed length, for example, about 23 nucleotides in length. In another embodiment, the siNA molecules of (a) are of differing length, for example having strands of about 15 to about 30 (e.g., about 15, 16, 17, 18, 19, 20, 21, 22, 23, 24, 25, 26, 27, 28, 29, or 30) nucleotides in length. In one embodiment, the assay can comprise a reconstituted in vitro siNA assay as described herein. In another embodiment, the assay can comprise a cell culture system in which target RNA is expressed. In another embodiment, fragments of target RNA are analyzed for detectable levels of cleavage, for example by gel electrophoresis, northern blot analysis, or RNAse protection assays, to determine the most suitable target site(s) within the target RNA sequence. The target RNA sequence can be obtained as is known in the art, for example, by cloning and/or transcription for in vitro systems, and by cellular expression in in vivo systems.

[0149] In one embodiment, the invention features a method comprising: (a) generating a randomized library of siNA constructs having a predetermined complexity, such as of 4^{N}, where N represents the number of base paired nucleotides in each of the siNA construct strands (eg. for a siNA construct having 21 nucleotide sense and antisense strands with 19 base pairs, the complexity would be 4¹⁹); and (b) assaying the siNA constructs of (a) above, under conditions suitable to determine RNAi target sites within the target HCV RNA sequence. In another embodiment, the siNA molecules of (a) have strands of a fixed length, for example about 23 nucleotides in length. In yet another embodiment, the siNA molecules of (a) are of differing length, for example having strands of about 15 to about 30 (e.g., about 15, 16, 17, 18, 19, 20, 21, 22, 23, 24, 25, 26, 27, 28, 29, or 30) nucleotides in length. In one embodiment, the assay can comprise a reconstituted in vitro siNA assay as described in Example 6 herein. In another embodiment, the assay can comprise a cell culture system in which target RNA is expressed. In another embodiment, fragments of HCV RNA are analyzed for detectable levels of cleavage, for example, by gel electrophoresis, northern blot analysis, or RNAse protection assays, to determine the most suitable target site(s) within the target HCV RNA sequence. The target HCV RNA sequence can be obtained as is known in the art, for example, by cloning and/or transcription for in vitro systems, and by cellular expression in in vivo systems.

[0150] In another embodiment, the invention features a method comprising: (a) analyzing the sequence of a RNA target encoded by a target gene; (b) synthesizing one or more sets of siNA molecules having sequence complementary to one or more regions of the RNA of (a); and (c) assaying the siNA molecules of (b) under conditions suitable to determine RNAi targets within the target RNA sequence. In one embodiment, the siNA molecules of (b) have strands of a fixed length, for example about 23 nucleotides in length. In another embodiment, the siNA molecules of (b) are of differing length, for example having strands of about 15 to about 30 (e.g., about 15, 16, 17, 18, 19, 20, 21, 22, 23, 24, 25, 26, 27, 28, 29, or 30) nucleotides in length. In one embodiment, the assay can comprise a reconstituted in vitro siNA assay as described herein. In another embodiment, the assay can comprise a cell culture system in which target RNA is expressed. Fragments of target RNA are analyzed for detectable levels of cleavage, for example by gel electrophoresis, northern blot analysis, or RNAse protection assays, to determine the most suitable target site(s) within the target RNA sequence. The target RNA sequence can be obtained as is known in the art, for example, by cloning and/or transcription for in vitro systems, and by expression in in vivo systems.

[0151] By “target site” is meant a sequence within a target RNA that is “targeted” for cleavage mediated by a siNA construct which contains sequences within its antisense region that are complementary to the target sequence.

[0152] By “detectable level of cleavage” is meant cleavage of target RNA (and formation of cleaved product RNAs) to an extent sufficient to discern cleavage products above the background of RNAs produced by random degradation of the target RNA. Production of cleavage products from 1-5% of the target RNA is sufficient to detect above the background for most methods of detection.

[0153] In one embodiment, the invention features a composition comprising a siNA molecule of the invention, which can be chemically-modified, in a pharmaceutically acceptable carrier or diluent. In another embodiment, the invention features a pharmaceutical composition comprising siNA molecules of the invention, which can be chemically-modified, targeting one or more genes in a pharmaceutically acceptable carrier or diluent. In another embodiment, the invention features a method for diagnosing a disease or condition in a subject comprising administering to the subject a composition of the invention under conditions suitable for the diagnosis of the disease or condition in the subject. In another embodiment, the invention features a method for treating or preventing a disease or condition in a subject, comprising administering to the subject a composition of the invention under conditions suitable for the treatment or prevention of the disease or condition in the subject, alone or in conjunction with one or more other therapeutic compounds. In yet another embodiment, the invention features a method for inhibiting, reducing or preventing HCV infection, liver failure, hepatocellular carcinoma, cirrhosis in a subject or organism comprising administering to the subject a composition of the invention under conditions suitable for inhibiting, reducing or preventing HCV infection, liver failure, hepatocellular carcinoma, cirrhosis in the subject or organism.

[0154] In another embodiment, the invention features a method for validating a HCV gene target, comprising: (a) synthesizing a siNA molecule of the invention, which can be chemically-modified, wherein one of the siNA strands includes a sequence complementary to RNA of a HCV target gene; (b) introducing the siNA molecule into a cell, tissue, subject, or organism under conditions suitable for modulating expression of the HCV target gene in the cell, tissue, subject, or organism; and (c) determining the function of the gene by assaying for any phenotypic change in the cell, tissue, subject, or organism.

[0155] In another embodiment, the invention features a method for validating a HCV target comprising: (a) synthesizing a siNA molecule of the invention, which can be chemically-modified, wherein one of the siNA strands includes a sequence complementary to RNA of a HCV target gene; (b) introducing the siNA molecule into a biological system under conditions suitable for modulating expression of the HCV target gene in the biological system; and (c) determining the function of the gene by assaying for any phenotypic change in the biological system.

[0156] By “biological system” is meant, material, in a purified or unpurified form, from biological sources, including but not limited to human or animal, wherein the system comprises the components required for RNAi activity. The term “biological system” includes, for example, a cell, tissue, subject, or organism, or extract thereof. The term biological system also includes reconstituted RNAi systems that can be used in an in vitro setting.

[0157] By “phenotypic change” is meant any detectable change to a cell that occurs in response to contact or treatment with a nucleic acid molecule of the invention (e.g., siNA). Such detectable changes include, but are not limited to, changes in shape, size, proliferation, motility, protein expression or RNA expression or other physical or chemical changes as can be assayed by methods known in the art. The detectable change can also include expression of reporter genes/molecules such as Green Florescent Protein (GFP) or various tags that are used to identify an expressed protein or any other cellular component that can be assayed.

[0158] In one embodiment, the invention features a kit containing a siNA molecule of the invention, which can be chemically-modified, that can be used to modulate the expression of a HCV target gene in a biological system, including, for example, in a cell, tissue, subject, or organism. In another embodiment, the invention features a kit containing more than one siNA molecule of the invention, which can be chemically-modified, that can be used to modulate the expression of more than one HCV target gene in a biological system, including, for example, in a cell, tissue, subject, or organism.

[0159] In one embodiment, the invention features a cell containing one or more siNA molecules of the invention, which can be chemically-modified. In another embodiment, the cell containing a siNA molecule of the invention is a mammalian cell. In yet another embodiment, the cell containing a siNA molecule of the invention is a human cell.

[0160] In one embodiment, the synthesis of a siNA molecule of the invention, which can be chemically-modified, comprises: (a) synthesis of two complementary strands of the siNA molecule; (b) annealing the two complementary strands together under conditions suitable to obtain a double-stranded siNA molecule. In another embodiment, synthesis of the two complementary strands of the siNA molecule is by solid phase oligonucleotide synthesis. In yet another embodiment, synthesis of the two complementary strands of the siNA molecule is by solid phase tandem oligonucleotide synthesis.

[0161] In one embodiment, the invention features a method for synthesizing a siNA duplex molecule comprising: (a) synthesizing a first oligonucleotide sequence strand of the siNA molecule, wherein the first oligonucleotide sequence strand comprises a cleavable linker molecule that can be used as a scaffold for the synthesis of the second oligonucleotide sequence strand of the siNA; (b) synthesizing the second oligonucleotide sequence strand of siNA on the scaffold of the first oligonucleotide sequence strand, wherein the second oligonucleotide sequence strand further comprises a chemical moiety than can be used to purify the siNA duplex; (c) cleaving the linker molecule of (a) under conditions suitable for the two siNA oligonucleotide strands to hybridize and form a stable duplex; and (d) purifying the siNA duplex utilizing the chemical moiety of the second oligonucleotide sequence strand. In one embodiment, cleavage of the linker molecule in (c) above takes place during deprotection of the oligonucleotide, for example, under hydrolysis conditions using an alkylamine base such as methylamine. In one embodiment, the method of synthesis comprises solid phase synthesis on a solid support such as controlled pore glass (CPG) or polystyrene, wherein the first sequence of (a) is synthesized on a cleavable linker, such as a succinyl linker, using the solid support as a scaffold. The cleavable linker in (a) used as a scaffold for synthesizing the second strand can comprise similar reactivity as the solid support derivatized linker, such that cleavage of the solid support derivatized linker and the cleavable linker of (a) takes place concomitantly. In another embodiment, the chemical moiety of (b) that can be used to isolate the attached oligonucleotide sequence comprises a trityl group, for example a dimethoxytrityl group, which can be employed in a trityl-on synthesis strategy as described herein. In yet another embodiment, the chemical moiety, such as a dimethoxytrityl group, is removed during purification, for example, using acidic conditions.

[0162] In a further embodiment, the method for siNA synthesis is a solution phase synthesis or hybrid phase synthesis wherein both strands of the siNA duplex are synthesized in tandem using a cleavable linker attached to the first sequence which acts a scaffold for synthesis of the second sequence. Cleavage of the linker under conditions suitable for hybridization of the separate siNA sequence strands results in formation of the double-stranded siNA molecule.

[0163] In another embodiment, the invention features a method for synthesizing a siNA duplex molecule comprising: (a) synthesizing one oligonucleotide sequence strand of the siNA molecule, wherein the sequence comprises a cleavable linker molecule that can be used as a scaffold for the synthesis of another oligonucleotide sequence; (b) synthesizing a second oligonucleotide sequence having complementarity to the first sequence strand on the scaffold of (a), wherein the second sequence comprises the other strand of the double-stranded siNA molecule and wherein the second sequence further comprises a chemical moiety than can be used to isolate the attached oligonucleotide sequence; (c) purifying the product of (b) utilizing the chemical moiety of the second oligonucleotide sequence strand under conditions suitable for isolating the full-length sequence comprising both siNA oligonucleotide strands connected by the cleavable linker and under conditions suitable for the two siNA oligonucleotide strands to hybridize and form a stable duplex. In one embodiment, cleavage of the linker molecule in (c) above takes place during deprotection of the oligonucleotide, for example, under hydrolysis conditions. In another embodiment, cleavage of the linker molecule in (c) above takes place after deprotection of the oligonucleotide. In another embodiment, the method of synthesis comprises solid phase synthesis on a solid support such as controlled pore glass (CPG) or polystyrene, wherein the first sequence of (a) is synthesized on a cleavable linker, such as a succinyl linker, using the solid support as a scaffold. The cleavable linker in (a) used as a scaffold for synthesizing the second strand can comprise similar reactivity or differing reactivity as the solid support derivatized linker, such that cleavage of the solid support derivatized linker and the cleavable linker of (a) takes place either concomitantly or sequentially. In one embodiment, the chemical moiety of (b) that can be used to isolate the attached oligonucleotide sequence comprises a trityl group, for example a dimethoxytrityl group.

[0164] In another embodiment, the invention features a method for making a double-stranded siNA molecule in a single synthetic process comprising: (a) synthesizing an oligonucleotide having a first and a second sequence, wherein the first sequence is complementary to the second sequence, and the first oligonucleotide sequence is linked to the second sequence via a cleavable linker, and wherein a terminal 5′-protecting group, for example, a 5′-O-dimethoxytrityl group (5′-O-DMT) remains on the oligonucleotide having the second sequence; (b) deprotecting the oligonucleotide whereby the deprotection results in the cleavage of the linker joining the two oligonucleotide sequences; and (c) purifying the product of (b) under conditions suitable for isolating the double-stranded siNA molecule, for example using a trityl-on synthesis strategy as described herein.

[0165] In another embodiment, the method of synthesis of siNA molecules of the invention comprises the teachings of Scaringe et al., U.S. Pat. Nos. 5,889,136; 6,008,400; and 6,111,086, incorporated by reference herein in their entirety.

[0166] In one embodiment, the invention features siNA constructs that mediate RNAi against HCV, wherein the siNA construct comprises one or more chemical modifications, for example, one or more chemical modifications having any of Formulae I-VII or any combination thereof that increases the nuclease resistance of the siNA construct.

[0167] In another embodiment, the invention features a method for generating siNA molecules with increased nuclease resistance comprising (a) introducing nucleotides having any of Formula I-VII or any combination thereof into a siNA molecule, and (b) assaying the siNA molecule of step (a) under conditions suitable for isolating siNA molecules having increased nuclease resistance.

[0168] In another embodiment, the invention features a method for generating siNA molecules with improved toxicologic profiles (e.g., have attenuated or no immunstimulatory properties) comprising (a) introducing nucleotides having any of Formula I-VII (e.g., siNA motifs referred to in Table IV) or any combination thereof into a siNA molecule, and (b) assaying the siNA molecule of step (a) under conditions suitable for isolating siNA molecules having improved toxicologic profiles.

[0169] In another embodiment, the invention features a method for generating siNA molecules that do not stimulate an interferon response (e.g., no interferon response or attenuated interferon response) in a cell, subject, or organism, comprising (a) introducing nucleotides having any of Formula I-VII (e.g., siNA motifs referred to in Table IV) or any combination thereof into a siNA molecule, and (b) assaying the siNA molecule of step (a) under conditions suitable for isolating siNA molecules that do not stimulate an interferon response.

[0170] By “improved toxicologic profile”, is meant that the chemically modified siNA construct exhibits decreased toxicity in a cell, subject, or organism compared to an unmodified siNA or siNA molecule having fewer modifications or modifications that are less effective in imparting improved toxicology. In a non-limiting example, siNA molecules with improved toxicologic profiles are associated with a decreased or attenuated immunostimulatory response in a cell, subject, or organism compared to an unmodified siNA or siNA molecule having fewer modifications or modifications that are less effective in imparting improved toxicology. In one embodiment, a siNA molecule with an improved toxicological profile comprises no ribonucleotides. In one embodiment, a siNA molecule with an improved toxicological profile comprises less than 5 ribonucleotides (e.g., 1, 2, 3, or 4 ribonucleotides). In one embodiment, a siNA molecule with an improved toxicological profile comprises Stab 7, Stab 8, Stab 11, Stab 12, Stab 13, Stab 16, Stab 17, Stab 18, Stab 19, Stab 20, Stab 23, Stab 24, Stab 25, Stab 26, Stab 27, Stab 28, Stab 29, Stab 30, Stab 31, Stab 32 or any combination thereof (see Table IV). In one embodiment, the level of immunostimulatory response associated with a given siNA molecule can be measured as is known in the art, for example by determining the level of PKR/interferon response, proliferation, B-cell activation, and/or cytokine production in assays to quantitate the immunostimulatory response of particular siNA molecules (see, for example, Leifer et al., 2003, J. Immunother. 26, 313-9; and U.S. Pat. No. 5,968,909, incorporated in its entirety by reference).

[0171] In one embodiment, the invention features siNA constructs that mediate RNAi against HCV, wherein the siNA construct comprises one or more chemical modifications described herein that modulates the binding affinity between the sense and antisense strands of the siNA construct.

[0172] In another embodiment, the invention features a method for generating siNA molecules with increased binding affinity between the sense and antisense strands of the siNA molecule comprising (a) introducing nucleotides having any of Formula I-VII or any combination thereof into a siNA molecule, and (b) assaying the siNA molecule of step (a) under conditions suitable for isolating siNA molecules having increased binding affinity between the sense and antisense strands of the siNA molecule.

[0173] In one embodiment, the invention features siNA constructs that mediate RNAi against HCV, wherein the siNA construct comprises one or more chemical modifications described herein that modulates the binding affinity between the antisense strand of the siNA construct and a complementary target RNA sequence within a cell.

[0174] In one embodiment, the invention features siNA constructs that mediate RNAi against HCV, wherein the siNA construct comprises one or more chemical modifications described herein that modulates the binding affinity between the antisense strand of the siNA construct and a complementary target DNA sequence within a cell.

[0175] In another embodiment, the invention features a method for generating siNA molecules with increased binding affinity between the antisense strand of the siNA molecule and a complementary target RNA sequence comprising (a) introducing nucleotides having any of Formula I-VII or any combination thereof into a siNA molecule, and (b) assaying the siNA molecule of step (a) under conditions suitable for isolating siNA molecules having increased binding affinity between the antisense strand of the siNA molecule and a complementary target RNA sequence.

[0176] In another embodiment, the invention features a method for generating siNA molecules with increased binding affinity between the antisense strand of the siNA molecule and a complementary target DNA sequence comprising (a) introducing nucleotides having any of Formula I-VII or any combination thereof into a siNA molecule, and (b) assaying the siNA molecule of step (a) under conditions suitable for isolating siNA molecules having increased binding affinity between the antisense strand of the siNA molecule and a complementary target DNA sequence.

[0177] In one embodiment, the invention features siNA constructs that mediate RNAi against HCV, wherein the siNA construct comprises one or more chemical modifications described herein that modulate the polymerase activity of a cellular polymerase capable of generating additional endogenous siNA molecules having sequence homology to the chemically-modified siNA construct.

[0178] In another embodiment, the invention features a method for generating siNA molecules capable of mediating increased polymerase activity of a cellular polymerase capable of generating additional endogenous siNA molecules having sequence homology to a chemically-modified siNA molecule comprising (a) introducing nucleotides having any of Formula I-VII or any combination thereof into a siNA molecule, and (b) assaying the siNA molecule of step (a) under conditions suitable for isolating siNA molecules capable of mediating increased polymerase activity of a cellular polymerase capable of generating additional endogenous siNA molecules having sequence homology to the chemically-modified siNA molecule.

[0179] In one embodiment, the invention features chemically-modified siNA constructs that mediate RNAi against HCV in a cell, wherein the chemical modifications do not significantly effect the interaction of siNA with a target RNA molecule, DNA molecule and/or proteins or other factors that are essential for RNAi in a manner that would decrease the efficacy of RNAi mediated by such siNA constructs.

[0180] In another embodiment, the invention features a method for generating siNA molecules with improved RNAi activity against HCV comprising (a) introducing nucleotides having any of Formula I-VII or any combination thereof into a siNA molecule, and (b) assaying the siNA molecule of step (a) under conditions suitable for isolating siNA molecules having improved RNAi activity.

[0181] In yet another embodiment, the invention features a method for generating siNA molecules with improved RNAi activity against HCV target RNA comprising (a) introducing nucleotides having any of Formula I-VII or any combination thereof into a siNA molecule, and (b) assaying the siNA molecule of step (a) under conditions suitable for isolating siNA molecules having improved RNAi activity against the target RNA.

[0182] In yet another embodiment, the invention features a method for generating siNA molecules with improved RNAi activity against HCV target DNA comprising (a) introducing nucleotides having any of Formula I-VII or any combination thereof into a siNA molecule, and (b) assaying the siNA molecule of step (a) under conditions suitable for isolating siNA molecules having improved RNAi activity against the target DNA.

[0183] In one embodiment, the invention features siNA constructs that mediate RNAi against HCV, wherein the siNA construct comprises one or more chemical modifications described herein that modulates the cellular uptake of the siNA construct.

[0184] In another embodiment, the invention features a method for generating siNA molecules against HCV with improved cellular uptake comprising (a) introducing nucleotides having any of Formula I-VII or any combination thereof into a siNA molecule, and (b) assaying the siNA molecule of step (a) under conditions suitable for isolating siNA molecules having improved cellular uptake.

[0185] In one embodiment, the invention features siNA constructs that mediate RNAi against HCV, wherein the siNA construct comprises one or more chemical modifications described herein that increases the bioavailability of the siNA construct, for example, by attaching polymeric conjugates such as polyethyleneglycol or equivalent conjugates that improve the pharmacokinetics of the siNA construct, or by attaching conjugates that target specific tissue types or cell types in vivo. Non-limiting examples of such conjugates are described in Vargeese et al., U.S. Ser. No. 10/201,394 incorporated by reference herein.

[0186] In one embodiment, the invention features a method for generating siNA molecules of the invention with improved bioavailability comprising (a) introducing a conjugate into the structure of a siNA molecule, and (b) assaying the siNA molecule of step (a) under conditions suitable for isolating siNA molecules having improved bioavailability. Such conjugates can include ligands for cellular receptors, such as peptides derived from naturally occurring protein ligands; protein localization sequences, including cellular ZIP code sequences; antibodies; nucleic acid aptamers; vitamins and other co-factors, such as folate and N-acetylgalactosamine; polymers, such as polyethyleneglycol (PEG); phospholipids; cholesterol; polyamines, such as spermine or spermidine; and others.

[0187] In one embodiment, the invention features a double stranded short interfering nucleic acid (siNA) molecule that comprises a first nucleotide sequence complementary to a target RNA sequence or a portion thereof, and a second sequence having complementarity to said first sequence, wherein said second sequence is chemically modified in a manner that it can no longer act as a guide sequence for efficiently mediating RNA interference and/or be recognized by cellular proteins that facilitate RNAi.

[0188] In one embodiment, the invention features a double stranded short interfering nucleic acid (siNA) molecule that comprises a first nucleotide sequence complementary to a target RNA sequence or a portion thereof, and a second sequence having complementarity to said first sequence, wherein the second sequence is designed or modified in a manner that prevents its entry into the RNAi pathway as a guide sequence or as a sequence that is complementary to a target nucleic acid (e.g., RNA) sequence. Such design or modifications are expected to enhance the activity of siNA and/or improve the specificity of siNA molecules of the invention. These modifications are also expected to minimize any off-target effects and/or associated toxicity.

[0189] In one embodiment, the invention features a double stranded short interfering nucleic acid (siNA) molecule that comprises a first nucleotide sequence complementary to a target RNA sequence or a portion thereof, and a second sequence having complementarity to said first sequence, wherein said second sequence is incapable of acting as a guide sequence for mediating RNA interference.

[0190] In one embodiment, the invention features a double stranded short interfering nucleic acid (siNA) molecule that comprises a first nucleotide sequence complementary to a target RNA sequence or a portion thereof, and a second sequence having complementarity to said first sequence, wherein said second sequence does not have a terminal 5′-hydroxyl (5′-OH) or 5′-phosphate group.

[0191] In one embodiment, the invention features a double stranded short interfering nucleic acid (siNA) molecule that comprises a first nucleotide sequence complementary to a target RNA sequence or a portion thereof, and a second sequence having complementarity to said first sequence, wherein said second sequence comprises a terminal cap moiety at the 5′-end of said second sequence. In one embodiment, the terminal cap moiety comprises an inverted abasic, inverted deoxy abasic, inverted nucleotide moiety, a group shown in FIG. 10, an alkyl or cycloalkyl group, a heterocycle, or any other group that prevents RNAi activity in which the second sequence serves as a guide sequence or template for RNAi.

[0192] In one embodiment, the invention features a double stranded short interfering nucleic acid (siNA) molecule that comprises a first nucleotide sequence complementary to a target RNA sequence or a portion thereof, and a second sequence having complementarity to said first sequence, wherein said second sequence comprises a terminal cap moiety at the 5′-end and 3′-end of said second sequence. In one embodiment, each terminal cap moiety individually comprises an inverted abasic, inverted deoxy abasic, inverted nucleotide moiety, a group shown in FIG. 10, an alkyl or cycloalkyl group, a heterocycle, or any other group that prevents RNAi activity in which the second sequence serves as a guide sequence or template for RNAi.

[0193] In one embodiment, the invention features a method for generating siNA molecules of the invention with improved specificity for down regulating or inhibiting the expression of a target nucleic acid (e.g., a DNA or RNA such as a gene or its corresponding RNA), comprising (a) introducing one or more chemical modifications into the structure of a siNA molecule, and (b) assaying the siNA molecule of step (a) under conditions suitable for isolating siNA molecules having improved specificity. In another embodiment, the chemical modification used to improve specificity comprises terminal cap modifications at the 5′-end, 3′-end, or both 5′ and 3′-ends of the siNA molecule. The terminal cap modifications can comprise, for example, structures shown in FIG. 10 (e.g. inverted deoxyabasic moieties) or any other chemical modification that renders a portion of the siNA molecule (e.g. the sense strand) incapable of mediating RNA interference against an off target nucleic acid sequence. In a non-limiting example, a siNA molecule is designed such that only the antisense sequence of the siNA molecule can serve as a guide sequence for RISC mediated degradation of a corresponding target RNA sequence. This can be accomplished by rendering the sense sequence of the siNA inactive by introducing chemical modifications to the sense strand that preclude recognition of the sense strand as a guide sequence by RNAi machinery. In one embodiment, such chemical modifications comprise any chemical group at the 5′-end of the sense strand of the siNA, or any other group that serves to render the sense strand inactive as a guide sequence for mediating RNA interference. These modifications, for example, can result in a molecule where the 5′-end of the sense strand no longer has a free 5′-hydroxyl (5′-OH) or a free 5′-phosphate group (e.g., phosphate, diphosphate, triphosphate, cyclic phosphate etc.). Non-limiting examples of such siNA constructs are described herein, such as “Stab 9/10”, “Stab 7/8”, “Stab 7/19”, “Stab 17/22”, “Stab 23/24”, “Stab 24/25”, and “Stab 24/26” (e.g., any siNA having Stab 7, 9, 17, 23, or 24 sense strands) chemistries and variants thereof (see Table 1) wherein the 5′-end and 3′-end of the sense strand of the siNA do not comprise a hydroxyl group or phosphate group.

[0194] In one embodiment, the invention features a method for generating siNA molecules of the invention with improved specificity for down regulating or inhibiting the expression of a target nucleic acid (e.g., a DNA or RNA such as a gene or its corresponding RNA), comprising introducing one or more chemical modifications into the structure of a siNA molecule that prevent a strand or portion of the siNA molecule from acting as a template or guide sequence for RNAi activity. In one embodiment, the inactive strand or sense region of the siNA molecule is the sense strand or sense region of the siNA molecule, i.e. the strand or region of the siNA that does not have complementarity to the target nucleic acid sequence. In one embodiment, such chemical modifications comprise any chemical group at the 5′-end of the sense strand or region of the siNA that does not comprise a 5′-hydroxyl (5′-OH) or 5′-phosphate group, or any other group that serves to render the sense strand or sense region inactive as a guide sequence for mediating RNA interference. Non-limiting examples of such siNA constructs are described herein, such as “Stab 9/10”, “Stab 7/8”, “Stab 7/19”, “Stab 17/22”, “Stab 23/24”, “Stab 24/25”, and “Stab 24/26” (e.g., any siNA having Stab 7, 9, 17, 23, or 24 sense strands) chemistries and variants thereof (see Table IV) wherein the 5′-end and 3′-end of the sense strand of the siNA do not comprise a hydroxyl group or phosphate group.

[0195] In one embodiment, the invention features a method for screening siNA molecules that are active in mediating RNA interference against a target nucleic acid sequence comprising (a) generating a plurality of unmodified siNA molecules, (b) screening the siNA molecules of step (a) under conditions suitable for isolating siNA molecules that are active in mediating RNA interference against the target nucleic acid sequence, and (c) introducing chemical modifications (e.g. chemical modifications as described herein or as otherwise known in the art) into the active siNA molecules of (b). In one embodiment, the method further comprises re-screening the chemically modified siNA molecules of step (c) under conditions suitable for isolating chemically modified siNA molecules that are active in mediating RNA interference against the target nucleic acid sequence.

[0196] In one embodiment, the invention features a method for screening chemically modified siNA molecules that are active in mediating RNA interference against a target nucleic acid sequence comprising (a) generating a plurality of chemically modified siNA molecules (e.g. siNA molecules as described herein or as otherwise known in the art), and (b) screening the siNA molecules of step (a) under conditions suitable for isolating chemically modified siNA molecules that are active in mediating RNA interference against the target nucleic acid sequence.

[0197] The term “ligand” refers to any compound or molecule, such as a drug, peptide, hormone, or neurotransmitter, that is capable of interacting with another compound, such as a receptor, either directly or indirectly. The receptor that interacts with a ligand can be present on the surface of a cell or can alternately be an intercellular receptor. Interaction of the ligand with the receptor can result in a biochemical reaction, or can simply be a physical interaction or association.

[0198] In another embodiment, the invention features a method for generating siNA molecules of the invention with improved bioavailability comprising (a) introducing an excipient formulation to a siNA molecule, and (b) assaying the siNA molecule of step (a) under conditions suitable for isolating siNA molecules having improved bioavailability. Such excipients include polymers such as cyclodextrins, lipids, cationic lipids, polyamines, phospholipids, nanoparticles, receptors, ligands, and others.

[0199] In another embodiment, the invention features a method for generating siNA molecules of the invention with improved bioavailability comprising (a) introducing nucleotides having any of Formulae I-VII or any combination thereof into a siNA molecule, and (b) assaying the siNA molecule of step (a) under conditions suitable for isolating siNA molecules having improved bioavailability.

[0200] In another embodiment, polyethylene glycol (PEG) can be covalently attached to siNA compounds of the present invention. The attached PEG can be any molecular weight, preferably from about 100 to about 50,000 daltons (Da).

[0201] The present invention can be used alone or as a component of a kit having at least one of the reagents necessary to carry out the in vitro or in vivo introduction of RNA to test samples and/or subjects. For example, preferred components of the kit include a siNA molecule of the invention and a vehicle that promotes introduction of the siNA into cells of interest as described herein (e.g., using lipids and other methods of transfection known in the art, see for example Beigelman et al, U.S. Pat. No. 6,395,713). The kit can be used for target validation, such as in determining gene function and/or activity, or in drug optimization, and in drug discovery (see for example Usman et al., U.S. Ser. No. 60/402,996). Such a kit can also include instructions to allow a user of the kit to practice the invention.

[0202] The term “short interfering nucleic acid”, “siNA”, “short interfering RNA”, “siRNA”, “short interfering nucleic acid molecule”, “short interfering oligonucleotide molecule”, or “chemically-modified short interfering nucleic acid molecule” as used herein refers to any nucleic acid molecule capable of inhibiting or down regulating gene expression or viral replication, for example by mediating RNA interference “RNAi” or gene silencing in a sequence-specific manner; see for example Zamore et al., 2000, Cell, 101, 25-33; Bass, 2001, Nature, 411, 428429; Elbashir et al., 2001, Nature, 411, 494-498; and Kreutzer et al., International PCT Publication No. WO 00/44895; Zemicka-Goetz et al., International PCT Publication No. WO 01/36646; Fire, International PCT Publication No. WO 99/32619; Plaetinck et al., International PCT Publication No. WO 00/01846; Mello and Fire, International PCT Publication No. WO 01/29058; Deschamps-Depaillette, International PCT Publication No. WO 99/07409; and Li et al., International PCT Publication No. WO 00/44914; Allshire, 2002, Science, 297, 1818-1819; Volpe et al., 2002, Science, 297, 1833-1837; Jenuwein, 2002, Science, 297, 2215-2218; and Hall et al., 2002, Science, 297, 2232-2237; Hutvagner and Zamore, 2002, Science, 297, 2056-60; McManus et al., 2002, RNA, 8, 842-850; Reinhart et al., 2002, Gene & Dev., 16, 1616-1626; and Reinhart & Bartel, 2002, Science, 297, 1831). Non limiting examples of siNA molecules of the invention are shown in FIGS. 4-6, and Tables II and III herein. For example the siNA can be a double-stranded polynucleotide molecule comprising self-complementary sense and antisense regions, wherein the antisense region comprises nucleotide sequence that is complementary to nucleotide sequence in a target nucleic acid molecule or a portion thereof and the sense region having nucleotide sequence corresponding to the target nucleic acid sequence or a portion thereof. The siNA can be assembled from two separate oligonucleotides, where one strand is the sense strand and the other is the antisense strand, wherein the antisense and sense strands are self-complementary (i.e. each strand comprises nucleotide sequence that is complementary to nucleotide sequence in the other strand; such as where the antisense strand and sense strand form a duplex or double stranded structure, for example wherein the double stranded region is about 15 to about 30, e.g., about 15, 16, 17, 18, 19, 20, 21, 22, 23, 24, 25, 26, 27, 28, 29 or 30 base pairs; the antisense strand comprises nucleotide sequence that is complementary to nucleotide sequence in a target nucleic acid molecule or a portion thereof and the sense strand comprises nucleotide sequence corresponding to the target nucleic acid sequence or a portion thereof (e.g., about 15 to about 25 or more nucleotides of the siNA molecule are complementary to the target nucleic acid or a portion thereof). Alternatively, the siNA is assembled from a single oligonucleotide, where the self-complementary sense and antisense regions of the siNA are linked by means of a nucleic acid based or non-nucleic acid-based linker(s). The siNA can be a polynucleotide with a duplex, asymmetric duplex, hairpin or asymmetric hairpin secondary structure, having self-complementary sense and antisense regions, wherein the antisense region comprises nucleotide sequence that is complementary to nucleotide sequence in a separate target nucleic acid molecule or a portion thereof and the sense region having nucleotide sequence corresponding to the target nucleic acid sequence or a portion thereof. The siNA can be a circular single-stranded polynucleotide having two or more loop structures and a stem comprising self-complementary sense and antisense regions, wherein the antisense region comprises nucleotide sequence that is complementary to nucleotide sequence in a target nucleic acid molecule or a portion thereof and the sense region having nucleotide sequence corresponding to the target nucleic acid sequence or a portion thereof, and wherein the circular polynucleotide can be processed either in vivo or in vitro to generate an active siNA molecule capable of mediating RNAi. The siNA can also comprise a single stranded polynucleotide having nucleotide sequence complementary to nucleotide sequence in a target nucleic acid molecule or a portion thereof (for example, where such siNA molecule does not require the presence within the siNA molecule of nucleotide sequence corresponding to the target nucleic acid sequence or a portion thereof), wherein the single stranded polynucleotide can further comprise a terminal phosphate group, such as a 5′-phosphate (see for example Martinez et al., 2002, Cell., 110, 563-574 and Schwarz et al., 2002, Molecular Cell, 10, 537-568), or 5′,3′-diphosphate. In certain embodiments, the siNA molecule of the invention comprises separate sense and antisense sequences or regions, wherein the sense and antisense regions are covalently linked by nucleotide or non-nucleotide linkers molecules as is known in the art, or are alternately non-covalently linked by ionic interactions, hydrogen bonding, van der waals interactions, hydrophobic interactions, and/or stacking interactions. In certain embodiments, the siNA molecules of the invention comprise nucleotide sequence that is complementary to nucleotide sequence of a target gene. In another embodiment, the siNA molecule of the invention interacts with nucleotide sequence of a target gene in a manner that causes inhibition of expression of the target gene. As used herein, siNA molecules need not be limited to those molecules containing only RNA, but further encompasses chemically-modified nucleotides and non-nucleotides. In certain embodiments, the short interfering nucleic acid molecules of the invention lack 2′-hydroxy (2′-OH) containing nucleotides. Applicant describes in certain embodiments short interfering nucleic acids that do not require the presence of nucleotides having a 2′-hydroxy group for mediating RNAi and as such, short interfering nucleic acid molecules of the invention optionally do not include any ribonucleotides (e.g., nucleotides having a 2′-OH group). Such siNA molecules that do not require the presence of ribonucleotides within the siNA molecule to support RNAi can however have an attached linker or linkers or other attached or associated groups, moieties, or chains containing one or more nucleotides with 2′-OH groups. Optionally, siNA molecules can comprise ribonucleotides at about 5, 10, 20, 30, 40, or 50% of the nucleotide positions. The modified short interfering nucleic acid molecules of the invention can also be referred to as short interfering modified oligonucleotides “siMON.” As used herein, the term siNA is meant to be equivalent to other terms used to describe nucleic acid molecules that are capable of mediating sequence specific RNAI, for example short interfering RNA (siRNA), double-stranded RNA (dsRNA), micro-RNA (miRNA), short hairpin RNA (shRNA), short interfering oligonucleotide, short interfering nucleic acid, short interfering modified oligonucleotide, chemically-modified siRNA, post-transcriptional gene silencing RNA (ptgsRNA), and others. In addition, as used herein, the term RNAi is meant to be equivalent to other terms used to describe sequence specific RNA interference, such as post transcriptional gene silencing, translational inhibition, or epigenetics. For example, siNA molecules of the invention can be used to epigenetically silence genes at both the post-transcriptional level or the pre-transcriptional level. In a non-limiting example, epigenetic regulation of gene expression by siNA molecules of the invention can result from siNA mediated modification of chromatin structure or methylation pattern to alter gene expression (see, for example, Verdel et al., 2004, Science, 303, 672-676; Pal-Bhadra et al., 2004, Science, 303, 669-672; Allshire, 2002, Science, 297, 1818-1819; Volpe et al., 2002, Science, 297, 1833-1837; Jenuwein, 2002, Science, 297, 2215-2218; and Hall et al., 2002, Science, 297, 2232-2237).

[0203] In one embodiment, a siNA molecule of the invention is a duplex forming oligonucleotide “DFO”, (see for example FIGS. 14-15 and Vaish et al., U.S. Ser. No. 10/727,780 filed Dec. 3, 2003 and International PCT Application No. US04/16390, filed May 24, 2004).

[0204] In one embodiment, a siNA molecule of the invention is a multifunctional siNA, (see for example FIGS. 16-21 and Jadhav et al., U.S. Ser. No. 60/543,480 filed Feb. 10, 2004 and International PCT Application No. US04/16390, filed May 24, 2004). In one embodiment, the multifunctional siNA of the invention can comprise sequence targeting, for example, two or more regions of HCV RNA (see for example target sequences in Tables II and III). In one embodiment, the multifunctional siNA of the invention can comprise sequence targeting HCV RNA and one or more cellular targets involved in the HCV lifecyle, such as cellular receptors, cell surface molecules, cellular enzymes, cellular transcription factors, and/or cytokines, second messengers, and cellular accessory molecules including, but not limited to, La antigen (see for example Costa-Mattioli et al., 2004, Mol Cell Biol., 24, 6861-70, e.g., Genbank Accession No. NM_{—}003142) (e.g., interferon regulatory factors (IRFs; e.g., Genbank Accession No. AF082503.1); cellular PKR protein kinase (e.g., Genbank Accession No. XM_{—}002661.7); human eukaryotic initiation factors 2B (elF2Bgamma; e.g., Genbank Accession No. AF256223, and/or elF2gamma; e.g., Genbank Accession No. NM_{—}006874.1); human DEAD Box protein (DDX3; e.g., Genbank Accession No. XM_{—}018021.2); and cellular proteins that bind to the poly(U) tract of the HCV 3′-UTR, such as polypyrimidine tract-binding protein (e.g., Genbank Accession Nos. NM_{—}031991.1 and XM_{—}042972.3).

[0205] By “asymmetric hairpin” as used herein is meant a linear siNA molecule comprising an antisense region, a loop portion that can comprise nucleotides or non-nucleotides, and a sense region that comprises fewer nucleotides than the antisense region to the extent that the sense region has enough complementary nucleotides to base pair with the antisense region and form a duplex with loop. For example, an asymmetric hairpin siNA molecule of the invention can comprise an antisense region having length sufficient to mediate RNAi in a cell or in vitro system (e.g. about 15 to about 30, or about 15, 16, 17, 18, 19, 20, 21, 22, 23, 24, 25, 26, 27, 28, 29, or 30 nucleotides) and a loop region comprising about 4 to about 12 (e.g., about 4, 5, 6, 7, 8, 9, 10, 11, or 12) nucleotides, and a sense region having about 3 to about 25 (e.g., about 3, 4, 5, 6, 7, 8, 9, 10, 11, 12, 13, 14, 15, 16, 17, 18, 19, 20, 21, 22, 23, 24, or 25) nucleotides that are complementary to the antisense region. The asymmetric hairpin siNA molecule can also comprise a 5′-terminal phosphate group that can be chemically modified. The loop portion of the asymmetric hairpin siNA molecule can comprise nucleotides, non-nucleotides, linker molecules, or conjugate molecules as described herein.

[0206] By “asymmetric duplex” as used herein is meant a siNA molecule having two separate strands comprising a sense region and an antisense region, wherein the sense region comprises fewer nucleotides than the antisense region to the extent that the sense region has enough complementary nucleotides to base pair with the antisense region and form a duplex. For example, an asymmetric duplex siNA molecule of the invention can comprise an antisense region having length sufficient to mediate RNAi in a cell or in vitro system (e.g. about 15 to about 30, or about 15, 16, 17, 18, 19, 20, 21, 22, 23, 24, 25, 26, 27, 28, 29, or 30 nucleotides) and a sense region having about 3 to about 25 (e.g., about 3, 4, 5, 6, 7, 8, 9, 10, 11, 12, 13, 14, 15, 16, 17, 18, 19, 20, 21, 22, 23, 24, or 25) nucleotides that are complementary to the antisense region.

[0207] By “modulate” is meant that the expression of the gene, or level of RNA molecule or equivalent RNA molecules encoding one or more proteins or protein subunits, or activity of one or more proteins or protein subunits is up regulated or down regulated, such that expression, level, or activity is greater than or less than that observed in the absence of the modulator. For example, the term “modulate” can mean “inhibit,” but the use of the word “modulate” is not limited to this definition.

[0208] By “inhibit”, “down-regulate”, or “reduce”, it is meant that the expression of the gene, or level of RNA molecules or equivalent RNA molecules encoding one or more proteins or protein subunits, or activity of one or more proteins or protein subunits, is reduced below that observed in the absence of the nucleic acid molecules (e.g., siNA) of the invention. In one embodiment, inhibition, down-regulation or reduction with an siNA molecule is below that level observed in the presence of an inactive or attenuated molecule. In another embodiment, inhibition, down-regulation, or reduction with siNA molecules is below that level observed in the presence of, for example, an siNA molecule with scrambled sequence or with mismatches. In another embodiment, inhibition, down-regulation, or reduction of gene expression with a nucleic acid molecule of the instant invention is greater in the presence of the nucleic acid molecule than in its absence. In one embodiment, inhibition, down regulation, or reduction of gene expression is associated with post transcriptional silencing, such as RNAi mediated cleavage of a target nucleic acid molecule (e.g. RNA) or inhibition of translation. In one embodiment, inhibition, down regulation, or reduction of gene expression is associated with pretranscriptional silencing.

[0209] By “gene”, or “target gene”, is meant a nucleic acid that encodes an RNA, for example, nucleic acid sequences including, but not limited to, structural genes encoding a polypeptide. A gene or target gene can also encode a functional RNA (fRNA) or non-coding RNA (ncRNA), such as small temporal RNA (stRNA), micro RNA (miRNA), small nuclear RNA (snRNA), short interfering RNA (siRNA), small nucleolar RNA (snRNA), ribosomal RNA (rRNA), transfer RNA (tRNA) and precursor RNAs thereof. Such non-coding RNAs can serve as target nucleic acid molecules for siNA mediated RNA interference in modulating the activity of fRNA or ncRNA involved in functional or regulatory cellular processes. Abberant FRNA or ncRNA activity leading to disease can therefore be modulated by siNA molecules of the invention. siNA molecules targeting fRNA and ncRNA can also be used to manipulate or alter the genotype or phenotype of a subject, organism or cell, by intervening in cellular processes such as genetic imprinting, transcription, translation, or nucleic acid processing (e.g., transamination, methylation etc.). The target gene can be a gene derived from a cell, an endogenous gene, a transgene, or exogenous genes such as genes of a pathogen, for example a virus, which is present in the cell after infection thereof. The cell containing the target gene can be derived from or contained in any organism, for example a plant, animal, protozoan, virus, bacterium, or fungus. Non-limiting examples of plants include monocots, dicots, or gymnosperms. Non-limiting examples of animals include vertebrates or invertebrates. Non-limiting examples of fungi include molds or yeasts. For a review, see for example Snyder and Gerstein, 2003, Science, 300, 258-260.

[0210] By “non-canonical base pair” is meant any non-Watson Crick base pair, such as mismatches and/or wobble base pairs, including flipped mismatches, single hydrogen bond mismatches, trans-type mismatches, triple base interactions, and quadruple base interactions. Non-limiting examples of such non-canonical base pairs include, but are not limited to, AC reverse Hoogsteen, AC wobble, AU reverse Hoogsteen, GU wobble, AA N7 amino, CC 2-carbonyl-amino(H1)-N-3-amino(H2), GA sheared, UC 4-carbonyl-amino, UU imino-carbonyl, AC reverse wobble, AU Hoogsteen, AU reverse Watson Crick, CG reverse Watson Crick, GC N3-amino-amino N3, AA N1-amino symmetric, AA N7-amino symmetric, GA N7-N1 amino-carbonyl, GA+carbonyl-amino N7-N1, GG N1-carbonyl symmetric, GG N3-amino symmetric, CC carbonyl-amino symmetric, CC N3-amino symmetric, UU 2-carbonyl-imino symmetric, UU 4-carbonyl-imino symmetric, AA amino-N3, AA N1-amino, AC amino 2-carbonyl, AC N3-amino, AC N7-amino, AU amino-4-carbonyl, AU N1-imino, AU N3-imino, AU N7-imino, CC carbonyl-amino, GA amino-N1, GA amino-N7, GA carbonyl-amino, GA N3-amino, GC amino-N3, GC carbonyl-amino, GC N3-amino, GC N7-amino, GG amino-N7, GG carbonyl-imino, GG N7-amino, GU amino-2-carbonyl, GU carbonyl-imino, GU imino-2-carbonyl, GU N7-imino, psiU imino-2-carbonyl, UC 4-carbonyl-amino, UC imino-carbonyl, UU imino4-carbonyl, AC C2-H-N3, GA carbonyl-C2-H, UU imino-4-carbonyl 2 carbonyl-C5-H, AC amino(A) N3(C)-carbonyl, GC imino amino-carbonyl, Gpsi imino-2-carbonyl amino-2-carbonyl, and GU imino amino-2-carbonyl base pairs.

[0211] By “HCV” as used herein is meant, any hepatitis C virus or HCV protein, peptide, or polypeptide having HCV activity, such as encoded by HCV Genbank Accession Nos. shown in Table I. The term HCV also refers to nucleic acid sequences encoding any HCV protein, peptide, or polypeptide having HCV activity. The term “HCV” is also meant to include other HCV encoding sequence, such as other HCV isoforms, mutant HCV genes, splice variants of HCV genes, and HCV gene polymorphisms. In one embodiment, the term HCV as used herein refers to cellular or host proteins or polynucleotides encoding such proteins or that are otherwise involved in HCV infection and/or replication.

[0212] By “homologous sequence” is meant, a nucleotide sequence that is shared by one or more polynucleotide sequences, such as genes, gene transcripts and/or non-coding polynucleotides. For example, a homologous sequence can be a nucleotide sequence that is shared by two or more genes encoding related but different proteins, such as different members of a gene family, different protein epitopes, different protein isoforms or completely divergent genes, such as a cytokine and its corresponding receptors. A homologous sequence can be a nucleotide sequence that is shared by two or more non-coding polynucleotides, such as noncoding DNA or RNA, regulatory sequences, introns, and sites of transcriptional control or regulation. Homologous sequences can also include conserved sequence regions shared by more than one polynucleotide sequence. Homology does not need to be perfect homology (e.g., 100%), as partially homologous sequences are also contemplated by the instant invention (e.g., 99%, 98%, 97%, 96%, 95%, 94%, 93%, 92%, 91%, 90%, 89%, 88%, 87%, 86%, 85%, 84%, 83%, 82%, 81%, 80% etc.).

[0213] By “conserved sequence region” is meant, a nucleotide sequence of one or more regions in a polynucleotide does not vary significantly between generations or from one biological system, subject, or organism to another biological system, subject, or organism. The polynucleotide can include both coding and non-coding DNA and RNA.

[0214] By “sense region” is meant a nucleotide sequence of a siNA molecule having complementarity to an antisense region of the siNA molecule. In addition, the sense region of a siNA molecule can comprise a nucleic acid sequence having homology with a target nucleic acid sequence.

[0215] By “antisense region” is meant a nucleotide sequence of a siNA molecule having complementarity to a target nucleic acid sequence. In addition, the antisense region of a siNA molecule can optionally comprise a nucleic acid sequence having complementarity to a sense region of the siNA molecule.

[0216] By “target nucleic acid” is meant any nucleic acid sequence whose expression or activity is to be modulated. The target nucleic acid can be DNA or RNA.

[0217] By “complementarity” is meant that a nucleic acid can form hydrogen bond(s) with another nucleic acid sequence by either traditional Watson-Crick or other non-traditional types. In reference to the nucleic molecules of the present invention, the binding free energy for a nucleic acid molecule with its complementary sequence is sufficient to allow the relevant function of the nucleic acid to proceed, e.g., RNAi activity. Determination of binding free energies for nucleic acid molecules is well known in the art (see, e.g., Turner et al., 1987, CSH Symp. Quant. Biol. LII pp. 123-133; Frier et al., 1986, Proc. Nat. Acad. Sci. USA 83:9373-9377; Turner et al., 1987, J. Am. Chem. Soc. 109:3783-3785). A percent complementarity indicates the percentage of contiguous residues in a nucleic acid molecule that can form hydrogen bonds (e.g., Watson-Crick base pairing) with a second nucleic acid sequence (e.g., 5, 6, 7, 8, 9, or 10 nucleotides out of a total of 10 nucleotides in the first oligonucleotide being based paired to a second nucleic acid sequence having 10 nucleotides represents 50%, 60%, 70%, 80%, 90%, and 100% complementary respectively). “Perfectly complementary” means that all the contiguous residues of a nucleic acid sequence will hydrogen bond with the same number of contiguous residues in a second nucleic acid sequence. In one embodiment, a siNA molecule of the invention comprises about 15 to about 30 or more (e.g., about 15, 16, 17, 18, 19, 20, 21, 22, 23, 24, 25, 26, 27, 28, 29, or 30 or more) nucleotides that are complementary to one or more target nucleic acid molecules or a portion thereof.

[0218] In one embodiment, siNA molecules of the invention that down regulate or reduce HCV gene expression are used for treating, preventing or reducing HCV infection, liver failure, hepatocellular carcinoma, or cirrhosis in a subject or organism.

[0219] In one embodiment of the present invention, each sequence of a siNA molecule of the invention is independently about 15 to about 30 nucleotides in length, in specific embodiments about 15, 16, 17, 18, 19, 20, 21, 22, 23, 24, 25, 26, 27, 28, 29, or 30 nucleotides in length. In another embodiment, the siNA duplexes of the invention independently comprise about 15 to about 30 base pairs (e.g., about 15, 16, 17, 18, 19, 20, 21, 22, 23, 24, 25, 26, 27, 28, 29, or 30). In another embodiment, one or more strands of the siNA molecule of the invention independently comprises about 15 to about 30 nucleotides (e.g., about 15, 16, 17, 18, 19, 20, 21, 22, 23, 24, 25, 26, 27, 28, 29, or 30) that are complementary to a target nucleic acid molecule. In yet another embodiment, siNA molecules of the invention comprising hairpin or circular structures are about 35 to about 55 (e.g., about 35, 40, 45, 50 or 55) nucleotides in length, or about 38 to about 44 (e.g., about 38, 39, 40, 41, 42, 43, or 44) nucleotides in length and comprising about 15 to about 25 (e.g., about 15, 16, 17, 18, 19, 20, 21, 22, 23, 24, or 25) base pairs. Exemplary siNA molecules of the invention are shown in Table II. Exemplary synthetic siNA molecules of the invention are shown in Table III and/or FIGS. 4-5.

[0220] As used herein “cell” is used in its usual biological sense, and does not refer to an entire multicellular organism, e.g., specifically does not refer to a human. The cell can be present in an organism, e.g., birds, plants and mammals such as humans, cows, sheep, apes, monkeys, swine, dogs, and cats. The cell can be prokaryotic (e.g., bacterial cell) or eukaryotic (e.g., mammalian or plant cell). The cell can be of somatic or germ line origin, totipotent or pluripotent, dividing or non-dividing. The cell can also be derived from or can comprise a gamete or embryo, a stem cell, or a fully differentiated cell.

[0221] The siNA molecules of the invention are added directly, or can be complexed with cationic lipids, packaged within liposomes, or otherwise delivered to target cells or tissues. The nucleic acid or nucleic acid complexes can be locally administered to relevant tissues ex vivo, or in vivo through direct dermal application, transdermal application, or injection, with or without their incorporation in biopolymers. In particular embodiments, the nucleic acid molecules of the invention comprise sequences shown in Tables II-III and/or FIGS. 4-5. Examples of such nucleic acid molecules consist essentially of sequences defined in these tables and figures. Furthermore, the chemically modified constructs described in Table IV can be applied to any siNA sequence of the invention.

[0222] In another aspect, the invention provides mammalian cells containing one or more siNA molecules of this invention. The one or more siNA molecules can independently be targeted to the same or different sites.

[0223] By “RNA” is meant a molecule comprising at least one ribonucleotide residue. By “ribonucleotide” is meant a nucleotide with a hydroxyl group at the 2′ position of a β-D-ribofuranose moiety. The terms include double-stranded RNA, single-stranded RNA, isolated RNA such as partially purified RNA, essentially pure RNA, synthetic RNA, recombinantly produced RNA, as well as altered RNA that differs from naturally occurring RNA by the addition, deletion, substitution and/or alteration of one or more nucleotides. Such alterations can include addition of non-nucleotide material, such as to the end(s) of the siNA or internally, for example at one or more nucleotides of the RNA. Nucleotides in the RNA molecules of the instant invention can also comprise non-standard nucleotides, such as non-naturally occurring nucleotides or chemically synthesized nucleotides or deoxynucleotides. These altered RNAs can be referred to as analogs or analogs of naturally-occurring RNA.

[0224] By “subject” is meant an organism, which is a donor or recipient of explanted cells or the cells themselves. “Subject” also refers to an organism to which the nucleic acid molecules of the invention can be administered. A subject can be a mammal or mammalian cells, including a human or human cells.

[0225] The term “phosphorothioate” as used herein refers to an internucleotide linkage having Formula I, wherein Z and/or W comprise a sulfur atom. Hence, the term phosphorothioate refers to both phosphorothioate and phosphorodithioate internucleotide linkages.

[0226] The term “phosphonoacetate” as used herein refers to an internucleotide linkage having Formula I, wherein Z and/or W comprise an acetyl or protected acetyl group.

[0227] The term “thiophosphonoacetate” as used herein refers to an internucleotide linkage having Formula I, wherein Z comprises an acetyl or protected acetyl group and W comprises a sulfur atom or alternately W comprises an acetyl or protected acetyl group and Z comprises a sulfur atom.

[0228] The term “universal base” as used herein refers to nucleotide base analogs that form base pairs with each of the natural DNA/RNA bases with little discrimination between them. Non-limiting examples of universal bases include C-phenyl, C-naphthyl and other aromatic derivatives, inosine, azole carboxamides, and nitroazole derivatives such as 3-nitropyrrole, 4-nitroindole, 5-nitroindole, and 6-nitroindole as known in the art (see for example Loakes, 2001, Nucleic Acids Research, 29, 2437-2447).

[0229] The term “acyclic nucleotide” as used herein refers to any nucleotide having an acyclic ribose sugar, for example where any of the ribose carbons (C1, C2, C3, C4, or C5), are independently or in combination absent from the nucleotide.

[0230] The nucleic acid molecules of the instant invention, individually, or in combination or in conjunction with other drugs, can be used to treat, inhibit, reduce, or prevent HCV infection, liver failure, hepatocellular carcinoma, and/or cirrhosis in a subject or organism. For example, the siNA molecules can be administered to a subject or can be administered to other appropriate cells evident to those skilled in the art, individually or in combination with one or more drugs under conditions suitable for the treatment.

[0231] In a further embodiment, the siNA molecules can be used in combination with other known treatments to treat, inhibit, reduce, or prevent HCV infection, liver failure, hepatocellular carcinoma, and/or cirrhosis in a subject or organism. For example, the described molecules could be used in combination with one or more known compounds, treatments, or procedures to treat, inhibit, reduce, or prevent HCV infection, liver failure, hepatocellular carcinoma, and/or cirrhosis in a subject or organism as are known in the art.

[0232] In one embodiment, the invention features an expression vector comprising a nucleic acid sequence encoding at least one siNA molecule of the invention, in a manner which allows expression of the siNA molecule. For example, the vector can contain sequence(s) encoding both strands of a siNA molecule comprising a duplex. The vector can also contain sequence(s) encoding a single nucleic acid molecule that is self-complementary and thus forms a siNA molecule. Non-limiting examples of such expression vectors are described in Paul et al., 2002, Nature Biotechnology, 19, 505; Miyagishi and Taira, 2002, Nature Biotechnology, 19, 497; Lee et al., 2002, Nature Biotechnology, 19, 500; and Novina et al., 2002, Nature Medicine, advance online publication doi: 10.1038/nm725.

[0233] In another embodiment, the invention features a mammalian cell, for example, a human cell, including an expression vector of the invention.

[0234] In yet another embodiment, the expression vector of the invention comprises a sequence for a siNA molecule having complementarity to a RNA molecule referred to by a Genbank Accession numbers, for example Genbank Accession Nos. shown in Table I.

[0235] In one embodiment, an expression vector of the invention comprises a nucleic acid sequence encoding two or more siNA molecules, which can be the same or different.

[0236] In another aspect of the invention, siNA molecules that interact with target RNA molecules and down-regulate gene encoding target RNA molecules (for example target RNA molecules referred to by Genbank Accession numbers herein) are expressed from transcription units inserted into DNA or RNA vectors. The recombinant vectors can be DNA plasmids or viral vectors. siNA expressing viral vectors can be constructed based on, but not limited to, adeno-associated virus, retrovirus, adenovirus, or alphavirus. The recombinant vectors capable of expressing the siNA molecules can be delivered as described herein, and persist in target cells. Alternatively, viral vectors can be used that provide for transient expression of siNA molecules. Such vectors can be repeatedly administered as necessary. Once expressed, the siNA molecules bind and down-regulate gene function or expression via RNA interference (RNAi). Delivery of siNA expressing vectors can be systemic, such as by intravenous or intramuscular administration, by administration to target cells ex-planted from a subject followed by reintroduction into the subject, or by any other means that would allow for introduction into the desired target cell.

[0237] By “vectors” is meant any nucleic acid- and/or viral-based technique used to deliver a desired nucleic acid.

[0238] Other features and advantages of the invention will be apparent from the following description of the preferred embodiments thereof, and from the claims.

### BRIEF DESCRIPTION OF THE DRAWINGS

[0239] FIG. 1 shows a non-limiting example of a scheme for the synthesis of siNA molecules. The complementary siNA sequence strands, strand 1 and strand 2, are synthesized in tandem and are connected by a cleavable linkage, such as a nucleotide succinate or abasic succinate, which can be the same or different from the cleavable linker used for solid phase synthesis on a solid support. The synthesis can be either solid phase or solution phase, in the example shown, the synthesis is a solid phase synthesis. The synthesis is performed such that a protecting group, such as a dimethoxytrityl group, remains intact on the terminal nucleotide of the tandem oligonucleotide. Upon cleavage and deprotection of the oligonucleotide, the two siNA strands spontaneously hybridize to form a siNA duplex, which allows the purification of the duplex by utilizing the properties of the terminal protecting group, for example by applying a trityl on purification method wherein only duplexes/oligonucleotides with the terminal protecting group are isolated.

[0240] FIG. 2 shows a MALDI-TOF mass spectrum of a purified siNA duplex synthesized by a method of the invention. The two peaks shown correspond to the predicted mass of the separate siNA sequence strands. This result demonstrates that the siNA duplex generated from tandem synthesis can be purified as a single entity using a simple trityl-on purification methodology.

[0241] FIG. 3 shows a non-limiting proposed mechanistic representation of target RNA degradation involved in RNAi. Double-stranded RNA (dsRNA), which is generated by RNA-dependent RNA polymerase (RdRP) from foreign single-stranded RNA, for example viral, transposon, or other exogenous RNA, activates the DICER enzyme that in turn generates siNA duplexes. Alternately, synthetic or expressed siNA can be introduced directly into a cell by appropriate means. An active siNA complex forms which recognizes a target RNA, resulting in degradation of the target RNA by the RISC endonuclease complex or in the synthesis of additional RNA by RNA-dependent RNA polymerase (RdRP), which can activate DICER and result in additional siNA molecules, thereby amplifying the RNAi response.

[0242] FIG. 4A-F shows non-limiting examples of chemically-modified siNA constructs of the present invention. In the figure, N stands for any nucleotide (adenosine, guanosine, cytosine, uridine, or optionally thymidine, for example thymidine can be substituted in the overhanging regions designated by parenthesis (N N). Various modifications are shown for the sense and antisense strands of the siNA constructs.

[0243] FIG. 4A: The sense strand comprises 21 nucleotides wherein the two terminal 3′-nucleotides are optionally base paired and wherein all nucleotides present are ribonucleotides except for (N N) nucleotides, which can comprise ribonucleotides, deoxynucleotides, universal bases, or other chemical modifications described herein. The antisense strand comprises 21 nucleotides, optionally having a 3′-terminal glyceryl moiety wherein the two terminal 3′-nucleotides are optionally complementary to the target RNA sequence, and wherein all nucleotides present are ribonucleotides except for (N N) nucleotides, which can comprise ribonucleotides, deoxynucleotides, universal bases, or other chemical modifications described herein. A modified internucleotide linkage, such as a phosphorothioate, phosphorodithioate or other modified internucleotide linkage as described herein, shown as “s”, optionally connects the (N N) nucleotides in the antisense strand.

[0244] FIG. 4B: The sense strand comprises 21 nucleotides wherein the two terminal 3′-nucleotides are optionally base paired and wherein all pyrimidine nucleotides that may be present are 2′deoxy-2′-fluoro modified nucleotides and all purine nucleotides that may be present are 2′-O-methyl modified nucleotides except for (N N) nucleotides, which can comprise ribonucleotides, deoxynucleotides, universal bases, or other chemical modifications described herein. The antisense strand comprises 21 nucleotides, optionally having a 3′-terminal glyceryl moiety and wherein the two terminal 3′-nucleotides are optionally complementary to the target RNA sequence, and wherein all pyrimidine nucleotides that may be present are 2′-deoxy-2′-fluoro modified nucleotides and all purine nucleotides that may be present are 2′-O-methyl modified nucleotides except for (N N) nucleotides, which can comprise ribonucleotides, deoxynucleotides, universal bases, or other chemical modifications described herein. A modified internucleotide linkage, such as a phosphorothioate, phosphorodithioate or other modified internucleotide linkage as described herein, shown as “s”, optionally connects the (N N) nucleotides in the sense and antisense strand.

[0245] FIG. 4C: The sense strand comprises 21 nucleotides having 5′- and 3′-terminal cap moieties wherein the two terminal 3′-nucleotides are optionally base paired and wherein all pyrimidine nucleotides that may be present are 2′-O-methyl or 2′-deoxy-2′-fluoro modified nucleotides except for (N N) nucleotides, which can comprise ribonucleotides, deoxynucleotides, universal bases, or other chemical modifications described herein. The antisense strand comprises 21 nucleotides, optionally having a 3′-terminal glyceryl moiety and wherein the two terminal 3′-nucleotides are optionally complementary to the target RNA sequence, and wherein all pyrimidine nucleotides that may be present are 2′-deoxy-2′-fluoro modified nucleotides except for (N N) nucleotides, which can comprise ribonucleotides, deoxynucleotides, universal bases, or other chemical modifications described herein. A modified internucleotide linkage, such as a phosphorothioate, phosphorodithioate or other modified internucleotide linkage as described herein, shown as “s”, optionally connects the (N N) nucleotides in the antisense strand.

[0246] FIG. 4D: The sense strand comprises 21 nucleotides having 5′- and 3′-terminal cap moieties wherein the two terminal 3′-nucleotides are optionally base paired and wherein all pyrimidine nucleotides that may be present are 2′-deoxy-2′-fluoro modified nucleotides except for (N N) nucleotides, which can comprise ribonucleotides, deoxynucleotides, universal bases, or other chemical modifications described herein and wherein and all purine nucleotides that may be present are 2′-deoxy nucleotides. The antisense strand comprises 21 nucleotides, optionally having a 3′-terminal glyceryl moiety and wherein the two terminal 3′-nucleotides are optionally complementary to the target RNA sequence, wherein all pyrimidine nucleotides that may be present are 2′-deoxy-2′-fluoro modified nucleotides and all purine nucleotides that may be present are 2′-O-methyl modified nucleotides except for (N N) nucleotides, which can comprise ribonucleotides, deoxynucleotides, universal bases, or other chemical modifications described herein. A modified internucleotide linkage, such as a phosphorothioate, phosphorodithioate or other modified internucleotide linkage as described herein, shown as “s”, optionally connects the (N N) nucleotides in the antisense strand.

[0247] FIG. 4E: The sense strand comprises 21 nucleotides having 5′- and 3′-terminal cap moieties wherein the two terminal 3′-nucleotides are optionally base paired and wherein all pyrimidine nucleotides that may be present are 2′-deoxy-2′-fluoro modified nucleotides except for (N N) nucleotides, which can comprise ribonucleotides, deoxynucleotides, universal bases, or other chemical modifications described herein. The antisense strand comprises 21 nucleotides, optionally having a 3′-terminal glyceryl moiety and wherein the two terminal 3′-nucleotides are optionally complementary to the target RNA sequence, and wherein all pyrimidine nucleotides that may be present are 2′-deoxy-2′-fluoro modified nucleotides and all purine nucleotides that may be present are 2′-O-methyl modified nucleotides except for (N N) nucleotides, which can comprise ribonucleotides, deoxynucleotides, universal bases, or other chemical modifications described herein. A modified internucleotide linkage, such as a phosphorothioate, phosphorodithioate or other modified internucleotide linkage as described herein, shown as “s”, optionally connects the (N N) nucleotides in the antisense strand.

[0248] FIG. 4F: The sense strand comprises 21 nucleotides having 5′- and 3′-terminal cap moieties wherein the two terminal 3′-nucleotides are optionally base paired and wherein all pyrimidine nucleotides that may be present are 2′-deoxy-2′-fluoro modified nucleotides except for (N N) nucleotides, which can comprise ribonucleotides, deoxynucleotides, universal bases, or other chemical modifications described herein and wherein and all purine nucleotides that may be present are 2′-deoxy nucleotides. The antisense strand comprises 21 nucleotides, optionally having a 3′-terminal glyceryl moiety and wherein the two terminal 3′-nucleotides are optionally complementary to the target RNA sequence, and having one 3′-terminal phosphorothioate internucleotide linkage and wherein all pyrimidine nucleotides that may be present are 2′-deoxy-2′-fluoro modified nucleotides and all purine nucleotides that may be present are 2′-deoxy nucleotides except for (N N) nucleotides, which can comprise ribonucleotides, deoxynucleotides, universal bases, or other chemical modifications described herein. A modified internucleotide linkage, such as a phosphorothioate, phosphorodithioate or other modified internucleotide linkage as described herein, shown as “s”, optionally connects the (N N) nucleotides in the antisense strand. The antisense strand of constructs A-F comprise sequence complementary to any target nucleic acid sequence of the invention. Furthermore, when a glyceryl moiety (L) is present at the 3′-end of the antisense strand for any construct shown in FIG. 4A-F, the modified internucleotide linkage is optional.

[0249] FIG. 5A-F shows non-limiting examples of specific chemically-modified siNA sequences of the invention. A-F applies the chemical modifications described in FIG. 4A-F to a HCV siNA sequence. Such chemical modifications can be applied to any HCV sequence and/or cellular target sequence.

[0250] FIG. 6 shows non-limiting examples of different siNA constructs of the invention. The examples shown (constructs 1, 2, and 3) have 19 representative base pairs; however, different embodiments of the invention include any number of base pairs described herein. Bracketed regions represent nucleotide overhangs, for example, comprising about 1, 2, 3, or 4 nucleotides in length, preferably about 2 nucleotides. Constructs 1 and 2 can be used independently for RNAi activity. Construct 2 can comprise a polynucleotide or non-nucleotide linker, which can optionally be designed as a biodegradable linker. In one embodiment, the loop structure shown in construct 2 can comprise a biodegradable linker that results in the formation of construct 1 in vivo and/or in vitro. In another example, construct 3 can be used to generate construct 2 under the same principle wherein a linker is used to generate the active siNA construct 2 in vivo and/or in vitro, which can optionally utilize another biodegradable linker to generate the active siNA construct 1 in vivo and/or in vitro. As such, the stability and/or activity of the siNA constructs can be modulated based on the design of the siNA construct for use in vivo or in vitro and/or in vitro.

[0251] FIG. 7A-C is a diagrammatic representation of a scheme utilized in generating an expression cassette to generate siNA hairpin constructs.

[0252] FIG. 7A: A DNA oligomer is synthesized with a 5′-restriction site (R1) sequence followed by a region having sequence identical (sense region of siNA) to a predetermined HCV target sequence, wherein the sense region comprises, for example, about 19, 20, 21, or 22 nucleotides (N) in length, which is followed by a loop sequence of defined sequence (X), comprising, for example, about 3 to about 10 nucleotides.

[0253] FIG. 7B: The synthetic construct is then extended by DNA polymerase to generate a hairpin structure having self-complementary sequence that will result in a siNA transcript having specificity for a HCV target sequence and having self-complementary sense and antisense regions.

[0254] FIG. 7C: The construct is heated (for example to about 95° C.) to linearize the sequence, thus allowing extension of a complementary second DNA strand using a primer to the 3′-restriction sequence of the first strand. The double-stranded DNA is then inserted into an appropriate vector for expression in cells. The construct can be designed such that a 3′-terminal nucleotide overhang results from the transcription, for example, by engineering restriction sites and/or utilizing a poly-U termination region as described in Paul et al., 2002, Nature Biotechnology, 29, 505-508.

[0255] FIG. 8A-C is a diagrammatic representation of a scheme utilized in generating an expression cassette to generate double-stranded siNA constructs.

[0256] FIG. 8A: A DNA oligomer is synthesized with a 5′-restriction (R1) site sequence followed by a region having sequence identical (sense region of siNA) to a predetermined HCV target sequence, wherein the sense region comprises, for example, about 19, 20, 21, or 22 nucleotides (N) in length, and which is followed by a 3′-restriction site (R2) which is adjacent to a loop sequence of defined sequence (X).

[0257] FIG. 8B: The synthetic construct is then extended by DNA polymerase to generate a hairpin structure having self-complementary sequence.

[0258] FIG. 8C: The construct is processed by restriction enzymes specific to R1 and R2 to generate a double-stranded DNA which is then inserted into an appropriate vector for expression in cells. The transcription cassette is designed such that a U6 promoter region flanks each side of the dsDNA which generates the separate sense and antisense strands of the siNA. Poly T termination sequences can be added to the constructs to generate U overhangs in the resulting transcript.

[0259] FIG. 9A-E is a diagrammatic representation of a method used to determine target sites for siNA mediated RNAi within a particular target nucleic acid sequence, such as messenger RNA.

[0260] FIG. 9A: A pool of siNA oligonucleotides are synthesized wherein the antisense region of the siNA constructs has complementarity to target sites across the target nucleic acid sequence, and wherein the sense region comprises sequence complementary to the antisense region of the siNA.

[0261] FIGS. 9B&C: (FIG. 9B) The sequences are pooled and are inserted into vectors such that (FIG. 9C) transfection of a vector into cells results in the expression of the siNA.

[0262] FIG. 9D: Cells are sorted based on phenotypic change that is associated with modulation of the target nucleic acid sequence.

[0263] FIG. 9E: The siNA is isolated from the sorted cells and is sequenced to identify efficacious target sites within the target nucleic acid sequence.

[0264] FIG. 10 shows non-limiting examples of different stabilization chemistries (1-10) that can be used, for example, to stabilize the 3′-end of siNA sequences of the invention, including (1) [3-3′]-inverted deoxyribose; (2) deoxyribonucleotide; (3) [5′-3′]-3′-deoxyribonucleotide; (4) [5′-3′]-ribonucleotide; (5) [5′-3′]-3′-O-methyl ribonucleotide; (6) 3′-glyceryl; (7) [3′-5′]-3′-deoxyribonucleotide; (8) [3′-3′]-deoxyribonucleotide; (9) [5′-2′]-deoxyribonucleotide; and (10) [5-3′]-dideoxyribonucleotide. In addition to modified and unmodified backbone chemistries indicated in the figure, these chemistries can be combined with different backbone modifications as described herein, for example, backbone modifications having Formula I. In addition, the 2′-deoxy nucleotide shown 5′ to the terminal modifications shown can be another modified or unmodified nucleotide or non-nucleotide described herein, for example modifications having any of Formulae I-VII or any combination thereof.

[0265] FIG. 11 shows a non-limiting example of a strategy used to identify chemically modified siNA constructs of the invention that are nuclease resistance while preserving the ability to mediate RNAi activity. Chemical modifications are introduced into the siNA construct based on educated design parameters (e.g. introducing 2′-mofications, base modifications, backbone modifications, terminal cap modifications etc). The modified construct in tested in an appropriate system (e.g. human serum for nuclease resistance, shown, or an animal model for PK/delivery parameters). In parallel, the siNA construct is tested for RNAi activity, for example in a cell culture system such as a luciferase reporter assay). Lead siNA constructs are then identified which possess a particular characteristic while maintaining RNAi activity, and can be further modified and assayed once again. This same approach can be used to identify siNA-conjugate molecules with improved pharmacokinetic profiles, delivery, and RNAi activity.

[0266] FIG. 12 shows non-limiting examples of phosphorylated siNA molecules of the invention, including linear and duplex constructs and asymmetric derivatives thereof.

[0267] FIG. 13 shows non-limiting examples of chemically modified terminal phosphate groups of the invention.

[0268] FIG. 14A shows a non-limiting example of methodology used to design self complementary DFO constructs utilizing palindrome and/or repeat nucleic acid sequences that are identified in a target nucleic acid sequence. (i) A palindrome or repeat sequence is identified in a nucleic acid target sequence. (ii) A sequence is designed that is complementary to the target nucleic acid sequence and the palindrome sequence. (iii) An inverse repeat sequence of the non-palindrome/repeat portion of the complementary sequence is appended to the 3′-end of the complementary sequence to generate a self complementary DFO molecule comprising sequence complementary to the nucleic acid target. (iv) The DFO molecule can self-assemble to form a double stranded oligonucleotide. FIG. 14B shows a non-limiting representative example of a duplex forming oligonucleotide sequence. FIG. 14C shows a non-limiting example of the self assembly schematic of a representative duplex forming oligonucleotide sequence. FIG. 14D shows a non-limiting example of the self assembly schematic of a representative duplex forming oligonucleotide sequence followed by interaction with a target nucleic acid sequence resulting in modulation of gene expression.

[0269] FIG. 15 shows a non-limiting example of the design of self complementary DFO constructs utilizing palindrome and/or repeat nucleic acid sequences that are incorporated into the DFO constructs that have sequence complementary to any target nucleic acid sequence of interest. Incorporation of these palindrome/repeat sequences allow the design of DFO constructs that form duplexes in which each strand is capable of mediating modulation of target gene expression, for example by RNAi. First, the target sequence is identified. A complementary sequence is then generated in which nucleotide or non-nucleotide modifications (shown as X or Y) are introduced into the complementary sequence that generate an artificial palindrome (shown as XYXYXY in the Figure). An inverse repeat of the non-palindrome/repeat complementary sequence is appended to the 3′-end of the complementary sequence to generate a self complementary DFO comprising sequence complementary to the nucleic acid target. The DFO can self-assemble to form a double stranded oligonucleotide.

[0270] FIG. 16 shows non-limiting examples of multifunctional siNA molecules of the invention comprising two separate polynucleotide sequences that are each capable of mediating RNAi directed cleavage of differing target nucleic acid sequences. FIG. 16A shows a non-limiting example of a multifunctional siNA molecule having a first region that is complementary to a first target nucleic acid sequence (complementary region 1) and a second region that is complementary to a second target nucleic acid sequence (complementary region 2), wherein the first and second complementary regions are situated at the 3′-ends of each polynucleotide sequence in the multifunctional siNA. The dashed portions of each polynucleotide sequence of the multifunctional siNA construct have complementarity with regard to corresponding portions of the siNA duplex, but do not have complementarity to the target nucleic acid sequences. FIG. 16B shows a non-limiting example of a multifunctional siNA molecule having a first region that is complementary to a first target nucleic acid sequence (complementary region 1) and a second region that is complementary to a second target nucleic acid sequence (complementary region 2), wherein the first and second complementary regions are situated at the 5′-ends of each polynucleotide sequence in the multifunctional siNA. The dashed portions of each polynucleotide sequence of the multifunctional siNA construct have complementarity with regard to corresponding portions of the siNA duplex, but do not have complementarity to the target nucleic acid sequences.

[0271] FIG. 17 shows non-limiting examples of multifunctional siNA molecules of the invention comprising a single polynucleotide sequence comprising distinct regions that are each capable of mediating RNAi directed cleavage of differing target nucleic acid sequences. FIG. 17A shows a non-limiting example of a multifunctional siNA molecule having a first region that is complementary to a first target nucleic acid sequence (complementary region 1) and a second region that is complementary to a second target nucleic acid sequence (complementary region 2), wherein the second complementary region is situated at the 3′-end of the polynucleotide sequence in the multifunctional siNA. The dashed portions of each polynucleotide sequence of the multifunctional siNA construct have complementarity with regard to corresponding portions of the siNA duplex, but do not have complementarity to the target nucleic acid sequences. FIG. 17B shows a non-limiting example of a multifunctional siNA molecule having a first region that is complementary to a first target nucleic acid sequence (complementary region 1) and a second region that is complementary to a second target nucleic acid sequence (complementary region 2), wherein the first complementary region is situated at the 5′-end of the polynucleotide sequence in the multifunctional siNA. The dashed portions of each polynucleotide sequence of the multifunctional siNA construct have complementarity with regard to corresponding portions of the siNA duplex, but do not have complementarity to the target nucleic acid sequences. In one embodiment, these multifunctional siNA constructs are processed in vivo or in vitro to generate multifunctional siNA constructs as shown in FIG. 16.

[0272] FIG. 18 shows non-limiting examples of multifunctional siNA molecules of the invention comprising two separate polynucleotide sequences that are each capable of mediating RNAi directed cleavage of differing target nucleic acid sequences and wherein the multifunctional siNA construct further comprises a self complementary, palindrome, or repeat region, thus enabling shorter bifuctional siNA constructs that can mediate RNA interference against differing target nucleic acid sequences. FIG. 18A shows a non-limiting example of a multifunctional siNA molecule having a first region that is complementary to a first target nucleic acid sequence (complementary region 1) and a second region that is complementary to a second target nucleic acid sequence (complementary region 2), wherein the first and second complementary regions are situated at the 3′-ends of each polynucleotide sequence in the multifunctional siNA, and wherein the first and second complementary regions further comprise a self complementary, palindrome, or repeat region. The dashed portions of each polynucleotide sequence of the multifunctional siNA construct have complementarity with regard to corresponding portions of the siNA duplex, but do not have complementarity to the target nucleic acid sequences. FIG. 18B shows a non-limiting example of a multifunctional siNA molecule having a first region that is complementary to a first target nucleic acid sequence (complementary region 1) and a second region that is complementary to a second target nucleic acid sequence (complementary region 2), wherein the first and second complementary regions are situated at the 5′-ends of each polynucleotide sequence in the multifunctional siNA, and wherein the first and second complementary regions further comprise a self complementary, palindrome, or repeat region. The dashed portions of each polynucleotide sequence of the multifunctional siNA construct have complementarity with regard to corresponding portions of the siNA duplex, but do not have complementarity to the target nucleic acid sequences.

[0273] FIG. 19 shows non-limiting examples of multifunctional siNA molecules of the invention comprising a single polynucleotide sequence comprising distinct regions that are each capable of mediating RNAi directed cleavage of differing target nucleic acid sequences and wherein the multifunctional siNA construct further comprises a self complementary, palindrome, or repeat region, thus enabling shorter bifuctional siNA constructs that can mediate RNA interference against differing target nucleic acid sequences. FIG. 19A shows a non-limiting example of a multifunctional siNA molecule having a first region that is complementary to a first target nucleic acid sequence (complementary region 1) and a second region that is complementary to a second target nucleic acid sequence (complementary region 2), wherein the second complementary region is situated at the 3′-end of the polynucleotide sequence in the multifunctional siNA, and wherein the first and second complementary regions further comprise a self complementary, palindrome, or repeat region. The dashed portions of each polynucleotide sequence of the multifunctional siNA construct have complementarity with regard to corresponding portions of the siNA duplex, but do not have complementarity to the target nucleic acid sequences. FIG. 19B shows a non-limiting example of a multifunctional siNA molecule having a first region that is complementary to a first target nucleic acid sequence (complementary region 1) and a second region that is complementary to a second target nucleic acid sequence (complementary region 2), wherein the first complementary region is situated at the 5′-end of the polynucleotide sequence in the multifunctional siNA, and wherein the first and second complementary regions further comprise a self complementary, palindrome, or repeat region. The dashed portions of each polynucleotide sequence of the multifunctional siNA construct have complementarity with regard to corresponding portions of the siNA duplex, but do not have complementarity to the target nucleic acid sequences. In one embodiment, these multifunctional siNA constructs are processed in vivo or in vitro to generate multifunctional siNA constructs as shown in FIG. 18.

[0274] FIG. 20 shows a non-limiting example of how multifunctional siNA molecules of the invention can target two separate target nucleic acid molecules, such as separate RNA molecules encoding differing proteins, for example, a cytokine and its corresponding receptor, differing viral strains, a virus and a cellular protein involved in viral infection or replication, or differing proteins involved in a common or divergent biologic pathway that is implicated in the maintenance of progression of disease. Each strand of the multifunctional siNA construct comprises a region having complementarity to separate target nucleic acid molecules. The multifunctional siNA molecule is designed such that each strand of the siNA can be utilized by the RISC complex to initiate RNA interference mediated cleavage of its corresponding target. These design parameters can include destabilization of each end of the siNA construct (see for example Schwarz et al., 2003, Cell, 115, 199-208). Such destabilization can be accomplished for example by using guanosine-cytidine base pairs, alternate base pairs (e.g., wobbles), or destabilizing chemically modified nucleotides at terminal nucleotide positions as is known in the art.

[0275] FIG. 21 shows a non-limiting example of how multifunctional siNA molecules of the invention can target two separate target nucleic acid sequences within the same target nucleic acid molecule, such as alternate coding regions of a RNA, coding and non-coding regions of a RNA, or alternate splice variant regions of a RNA. Each strand of the multifunctional siNA construct comprises a region having complementarity to the separate regions of the target nucleic acid molecule. The multifunctional siNA molecule is designed such that each strand of the siNA can be utilized by the RISC complex to initiate RNA interference mediated cleavage of its corresponding target region. These design parameters can include destabilization of each end of the siNA construct (see for example Schwarz et al., 2003, Cell, 115, 199-208). Such destabilization can be accomplished for example by using guanosine-cytidine base pairs, alternate base pairs (e.g., wobbles), or destabilizing chemically modified nucleotides at terminal nucleotide positions as is known in the art.

[0276] FIG. 22 shows non-limiting examples of inhibition of viral replication of a HCV/poliovirus chimera by siNA constructs targeted to HCV chimera (29579/29586; 29578/29585) compared to control (29593/29600).

[0277] FIG. 23 shows a non-limiting example of a dose response study demonstrating the inhibition of viral replication of a HCV/poliovirus chimera by siNA construct (29579/29586) at various concentrations (1 nM, 5 nM, 10 nM, and 25 nM) compared to control (29593/29600).

[0278] FIG. 24 shows a non-limiting example demonstrating the inhibition of viral replication of a HCV/poliovirus chimera by a chemically modified siRNA construct (30051/30053) compared to control construct (30052/30054).

[0279] FIG. 25 shows a non-limiting example demonstrating the inhibition of viral replication of a HCV/poliovirus chimera by a chemically modified siRNA construct (30055/30057) compared to control construct (30056/30058).

[0280] FIG. 26 shows a non-limiting example of several chemically modified siRNA constructs targeting viral replication of an HCV/poliovirus chimera at 10 nM treatment in comparison to a lipid control and an inverse siNA control construct 29593/29600.

[0281] FIG. 27 shows a non-limiting example of several chemically modified siRNA constructs targeting viral replication of a HCV/poliovirus chimera at 25 nM treatment in comparison to a lipid control and an inverse siNA control construct 29593/29600.

[0282] FIG. 28 shows a non-limiting example of several chemically modified siRNA constructs targeting viral replication of a Huh7 HCV replicon system at 25 nM treatment in comparison to untreated cells (“cells”), cells transfected with lipofectamine (“LFA2K”) and inverse siNA control constructs (“Inv”).

[0283] FIG. 29 shows a non-limiting example of a dose response study using chemically modified siNA molecules (Stab 4/5, see Table IV) targeting HCV RNA sites 291, 300, and 303 in a Huh7 HCV replicon system at 5, 10, 25, and 100 nM treatment in comparison to untreated cells (“cells”), cells transfected with lipofectamine (“LFA”) and inverse siNA control constructs (“Inv”).

[0284] FIG. 30 shows a non-limiting example of several chemically modified siNA constructs (Stab 7/8, see Table IV) targeting viral replication in a Huh7 HCV replicon system at 25 nM treatment in comparison to untreated cells (“cells”), cells transfected with lipofectamine (“Lipid”) and inverse siNA control constructs (“Inv”).

[0285] FIG. 31 shows a non-limiting example of a dose response study using chemically modified siNA molecules (Stab 7/8, see Table IV) targeting HCV site 327 in a Huh7 HCV replicon system at 5, 10, 25, 50, and 100 nM treatment in comparison to inverse siNA control constructs.

[0286] FIG. 32 shows the results of a study in which siNA/interferon combination treatments were assayed using 0-100 nM siNA in a HCV Subgenomic Replicon system in Huh7 cells compared to interferon alone.

[0287] FIG. 33 shows the results of a dose response study in which multifunctional siNAs targeting sites 304 and 327 (MF 36447/34588/38310) and sites 282 and 304 (MF 34588/36445/38311) of HCV RNA were evaluated with an irrelevant multifunctional siNA control (MF Control) and pools of individual siNA constructs targeting sites 304 (34583/34588) and 327 (34585/32201), and sites 282 (34581/34586) and 304 (34583/34588), along with untreated cells and a transfection control (LFA) from 0.1 to 10 nM. Compound numbers for the siNA constructs are shown in Table III. As shown in the figure, the multifunctional siNA constructs show equivalent activity to the corresponding pooled siNA constructs.

[0288] FIG. 34 shows the results of a dose response study in which chemically stabilized multifunctional siNAs targeting sites 282 and 304 (MF 38314/38294/38300) of HCV RNA was evaluated with individual siNA constructs targeting sites 282 (33139/38294) and 304 (33149/38300) and a pool of the individual siNA constructs targeting sites 282 (33139/38294) and 304 (33149/38300), along with untreated cells and a transfection control (LFA) from 0.1 to 25 nM. Compound numbers for the siNA constructs are shown in Table III. As shown in the figure, the multifunctional siNA constructs show equivalent activity to the corresponding individual and pooled siNA constructs.

[0289] FIG. 35 shows the results of a dose response study in which chemically stabilized multifunctional siNAs targeting sites 282 and 304 (MF 38314/38297/38300) of HCV RNA was evaluated with individual siNA constructs targeting site 282 (33139/38297) and a pool of individual siNA constructs targeting sites 282 (33139/38297) and 304 (33149/38300), along with untreated cells and a transfection control (LFA) from 0.1 to 25 nM. Compound numbers for the siNA constructs are shown in Table III. As shown in the figure, the multifunctional siNA constructs show equivalent activity to the corresponding individual and pooled siNA constructs.

[0290] FIG. 36 shows the results of a dose response study in which chemically stabilized multifunctional siNAs targeting sites 327 and 304 (MF 38312/37791/38300) of HCV RNA was evaluated with individual siNA constructs targeting site 327 (31703/37791) and a pool of individual siNA constructs targeting sites 327 (31703/37791) and 304 (33149/38300), along with untreated cells and a transfection control (LFA) from 0.1 to 25 nM. Compound numbers for the siNA constructs are shown in Table III. As shown in the figure, the multifunctional siNA constructs show equivalent activity to the corresponding individual and pooled siNA constructs.

[0291] FIG. 37 shows the results of a dose response study in which chemically stabilized multifunctional siNAs targeting sites 327 and 304 (MF 38312/38302/38300) of HCV RNA was evaluated with individual siNA constructs targeting site 327 (31703/38302) and a pool of individual siNA constructs targeting sites 327 (31703/38302) and 304 (33149/38300), along with untreated cells and a transfection control (LFA) from 0.1 to 25 nM. Compound numbers for the siNA constructs are shown in Table III. As shown in the figure, the multifunctional siNA constructs show equivalent activity to the corresponding individual and pooled siNA constructs.

[0292] FIG. 38 shows the results of a dose response study in which chemically stabilized multifunctional siNAs targeting sites 327 and 282 (MF 38313/38302/38297) of HCV RNA was evaluated a pool of individual siNA constructs targeting sites 327 (31703/37791) and 282 (33139/38294), and another pool of individual siNA constructs targeting sites 327 (31703/38302) and 282 (33139/38397) along with untreated cells and a transfection control (LFA) from 0.1 to 25 nM. Compound numbers for the siNA constructs are shown in Table III. As shown in the figure, the multifunctional siNA constructs show equivalent activity to the corresponding pooled siNA constructs.

[0293] FIG. 39 shows the results of a dose response study in which chemically stabilized multifunctional siNAs targeting sites 282 and 304 (MF 38314/38297/38300) of HCV RNA was evaluated a pool of individual siNA constructs targeting sites 282 (33139/38294) and 304 (33149/38300), and another pool of individual siNA constructs targeting sites 282 (33139/38297) and 304 (33149/38300) along with untreated cells and a transfection control (LFA) from 0.1 to 25 nM. Compound numbers for the siNA constructs are shown in Table III. As shown in the figure, the multifunctional siNA constructs show equivalent activity to the corresponding pooled siNA constructs.

[0294] FIG. 40 shows the results of a dose response study in which chemically stabilized multifunctional siNAs targeting sites 327 and 304 (MF 38312/38302/38300) of HCV RNA was evaluated a pool of individual siNA constructs targeting sites 327 (31703/37791) and 304 (33149/38300), and another pool of individual siNA constructs targeting sites 327 (31703/38302) and 304 (33149/38300) along with untreated cells and a transfection control (LFA) from 0.1 to 25 nM. Compound numbers for the siNA constructs are shown in Table III. As shown in the figure, the multifunctional siNA constructs show equivalent activity to the corresponding pooled siNA constructs.

[0295] FIG. 41 shows the results of a dose response study in which chemically stabilized multifunctional siNAs targeting sites 282 and 327 (MF 38313/38297/38302) of HCV RNA was evaluated a pool of individual siNA constructs targeting sites 282 (33139/38294) and 327 (31703/37791), and another pool of individual siNA constructs targeting sites 282 (33139/38297) and 327 (31703/38302) along with untreated cells and a transfection control (LFA) from 0.1 to 25 nM. Compound numbers for the siNA constructs are shown in Table III. As shown in the figure, the multifunctional siNA constructs show equivalent activity to the corresponding pooled siNA constructs.

[0296] FIGS. 42A-42H shows non-limiting examples of tethered multiifunctional siNA constructs of the invention. In the examples shown, a linker (e.g., nucleotide or non-nucleotide linker) connects two siNA regions (e.g., two sense, two antisense, or alternately a sense and an antisense region together. Separate sense (or sense and antisense) sequences corresponding to a first target sequence and second target sequence are hybridized to their corresponding sense and/or antisense sequences in the multifunctional siNA. In addition, various conjugates, ligands, aptamers, polymers or reporter molecules can be attached to the linker region for selective or improved delivery and/or pharmacokinetic properties.

[0297] FIG. 43 shows a non-limiting example of various dendrimer based multifunctional siNA designs.

[0298] FIG. 44 shows a non-limiting example of various supramolecular multifunctional siNA designs.

[0299] FIG. 45 shows a non-limiting example of a dicer enabled multifunctional siNA design using a 30 nucleotide precursor siNA construct. A 30 base pair duplex is cleaved by Dicer into 22 and 8 base pair products from either end (8 b.p. fragments not shown). For ease of presentation the overhangs generated by dicer are not shown—but can be compensated for. Three targeting sequences are shown. The required sequence identity overlapped is indicated by grey boxes. The N's of the parent 30 b.p. siNA are suggested sites of 2′-OH positions to enable Dicer cleavage if this is tested in stabilized chemistries. Note that processing of a 30mer duplex by Dicer RNase III does not give a precise 22+8 cleavage, but rather produces a series of closely related products (with 22+8 being the primary site). Therefore, processing by Dicer will yield a series of active siNAs.

[0300] FIG. 46 shows a non-limiting example of a dicer enabled multifunctional siNA design using a 40 nucleotide precursor siNA construct. A 40 base pair duplex is cleaved by Dicer into 20 base pair products from either end. For ease of presentation the overhangs generated by dicer are not shown—but can be compensated for. Four targeting sequences are shown. The required sequence identity overlapped is indicated by grey boxes. This design format can be extended to larger RNAs. If chemically stabilized siNAs are bound by Dicer, then strategically located ribonucleotide linkages can enable designer cleavage products that permit our more extensive repertoire of multiifunctional designs. For example cleavage products not limited to the Dicer standard of approximately 22-nucleotides can allow multifunctional siNA constructs with a target sequence identity overlap ranging from, for example, about 3 to about 15 nucleotides.

[0301] FIG. 47 shows a non-limiting example of inhibition of HBV RNA by dicer enabled multifunctional siNA constructs targeting HBV site 263. When the first 17 nucleotides of a siNA antisense strand (e.g., 21 nucleotide strands in a duplex with 3′-TT overhangs) are complementary to a target RNA, robust silencing was observed at 25 nM. 80% silencing was observed with only 16 nucleotide complementarity in the same format.

[0302] FIG. 48 shows a non-limiting example of additional multifunctional siNA construct designs of the invention. In one example, a conjugate, ligand, aptamer, label, or other moiety is attached to a region of the multifunctional siNA to enable improved delivery or pharmacokinetic profiling.

[0303] FIG. 49 shows a non-limiting example of additional multifunctional siNA construct designs of the invention. In one example, a conjugate, ligand, aptamer, label, or other moiety is attached to a region of the multifunctional siNA to enable improved delivery or pharmacokinetic profiling.

### DETAILED DESCRIPTION OF THE INVENTION

Mechanism of Action of Nucleic Acid Molecules of the Invention

[0304] The discussion that follows discusses the proposed mechanism of RNA interference mediated by short interfering RNA as is presently known, and is not meant to be limiting and is not an admission of prior art. Applicant demonstrates herein that chemically-modified short interfering nucleic acids possess similar or improved capacity to mediate RNAi as do siRNA molecules and are expected to possess improved stability and activity in vivo; therefore, this discussion is not meant to be limiting only to siRNA and can be applied to siNA as a whole. By “improved capacity to mediate RNAi” or “improved RNAi activity” is meant to include RNAi activity measured in vitro and/or in vivo where the RNAi activity is a reflection of both the ability of the siNA to mediate RNAi and the stability of the siNAs of the invention. In this invention, the product of these activities can be increased in vitro and/or in vivo compared to an all RNA siRNA or a siNA containing a plurality of ribonucleotides. In some cases, the activity or stability of the siNA molecule can be decreased (i.e., less than ten-fold), but the overall activity of the siNA molecule is enhanced in vitro and/or in vivo.

[0305] RNA interference refers to the process of sequence specific post-transcriptional gene silencing in animals mediated by short interfering RNAs (siRNAs) (Fire et al., 1998, Nature, 391, 806). The corresponding process in plants is commonly referred to as post-transcriptional gene silencing or RNA silencing and is also referred to as quelling in fungi. The process of post-transcriptional gene silencing is thought to be an evolutionarily-conserved cellular defense mechanism used to prevent the expression of foreign genes which is commonly shared by diverse flora and phyla (Fire et al., 1999, Trends Genet., 15, 358). Such protection from foreign gene expression may have evolved in response to the production of double-stranded RNAs (dsRNAs) derived from viral infection or the random integration of transposon elements into a host genome via a cellular response that specifically destroys homologous single-stranded RNA or viral genomic RNA. The presence of dsRNA in cells triggers the RNAi response though a mechanism that has yet to be fully characterized. This mechanism appears to be different from the interferon response that results from dsRNA-mediated activation of protein kinase PKR and 2′,5′-oligoadenylate synthetase resulting in non-specific cleavage of mRNA by ribonuclease L.

[0306] The presence of long dsRNAs in cells stimulates the activity of a ribonuclease III enzyme referred to as Dicer. Dicer is involved in the processing of the dsRNA into short pieces of dsRNA known as short interfering RNAs (siRNAs) (Berstein et al., 2001, Nature, 409, 363). Short interfering RNAs derived from Dicer activity are typically about 21 to about 23 nucleotides in length and comprise about 19 base pair duplexes. Dicer has also been implicated in the excision of 21- and 22-nucleotide small temporal RNAs (stRNAs) from precursor RNA of conserved structure that are implicated in translational control (Hutvagner et al., 2001, Science, 293, 834). The RNAi response also features an endonuclease complex containing a siRNA, commonly referred to as an RNA-induced silencing complex (RISC), which mediates cleavage of single-stranded RNA having sequence homologous to the siRNA. Cleavage of the target RNA takes place in the middle of the region complementary to the guide sequence of the siRNA duplex (Elbashir et al., 2001, Genes Dev., 15, 188). In addition, RNA interference can also involve small RNA (e.g., micro-RNA or miRNA) mediated gene silencing, presumably though cellular mechanisms that regulate chromatin structure and thereby prevent transcription of target gene sequences (see for example Allshire, 2002, Science, 297, 1818-1819; Volpe et al., 2002, Science, 297, 1833-1837; Jenuwein, 2002, Science, 297, 2215-2218; and Hall et al., 2002, Science, 297, 2232-2237). As such, siNA molecules of the invention can be used to mediate gene silencing via interaction with RNA transcripts or alternately by interaction with particular gene sequences, wherein such interaction results in gene silencing either at the transcriptional level or post-transcriptional level.

[0307] RNAi has been studied in a variety of systems. Fire et al., 1998, Nature, 391, 806, were the first to observe RNAi in C. elegans. Wianny and Goetz, 1999, Nature Cell Biol., 2, 70, describe RNAi mediated by dsRNA in mouse embryos. Hammond et al., 2000, Nature, 404, 293, describe RNAi in Drosophila cells transfected with dsRNA. Elbashir et al., 2001, Nature, 411, 494, describe RNAi induced by introduction of duplexes of synthetic 21-nucleotide RNAs in cultured mammalian cells including human embryonic kidney and HeLa cells. Recent work in Drosophila embryonic lysates has revealed certain requirements for siRNA length, structure, chemical composition, and sequence that are essential to mediate efficient RNAi activity. These studies have shown that 21 nucleotide siRNA duplexes are most active when containing two 2-nucleotide 3′-terminal nucleotide overhangs. Furthermore, substitution of one or both siRNA strands with 2′-deoxy or 2′-O-methyl nucleotides abolishes RNAi activity, whereas substitution of 3′-terminal siRNA nucleotides with deoxy nucleotides was shown to be tolerated. Mismatch sequences in the center of the siRNA duplex were also shown to abolish RNAi activity. In addition, these studies also indicate that the position of the cleavage site in the target RNA is defined by the 5′-end of the siRNA guide sequence rather than the 3′-end (Elbashir et al., 2001, EMBO J., 20, 6877). Other studies have indicated that a 5′-phosphate on the target-complementary strand of a siRNA duplex is required for siRNA activity and that ATP is utilized to maintain the 5′-phosphate moiety on the siRNA (Nykanen et al., 2001, Cell, 107, 309); however, siRNA molecules lacking a 5′-phosphate are active when introduced exogenously, suggesting that 5′-phosphorylation of siRNA constructs may occur in vivo.

Duplex Forming Oligonucleotides (DFO) of the Invention

[0308] In one embodiment, the invention features siNA molecules comprising duplex forming oligonucleotides (DFO) that can self-assemble into double stranded oligonucleotides. The duplex forming oligonucleotides of the invention can be chemically synthesized or expressed from transcription units and/or vectors. The DFO molecules of the instant invention provide useful reagents and methods for a variety of therapeutic, diagnostic, agricultural, veterinary, target validation, genomic discovery, genetic engineering and pharmacogenomic applications.

[0309] Applicant demonstrates herein that certain oligonucleotides, refered to herein for convenience but not limitation as duplex forming oligonucleotides or DFO molecules, are potent mediators of sequence specific regulation of gene expression. The oligonucleotides of the invention are distinct from other nucleic acid sequences known in the art (e.g., siRNA, miRNA, stRNA, shRNA, antisense oligonucleotides etc.) in that they represent a class of linear polynucleotide sequences that are designed to self-assemble into double stranded oligonucleotides, where each strand in the double stranded oligonucleotides comprises a nucleotide sequence that is complementary to a target nucleic acid molecule. Nucleic acid molecules of the invention can thus self assemble into functional duplexes in which each strand of the duplex comprises the same polynucleotide sequence and each strand comprises a nucleotide sequence that is complementary to a target nucleic acid molecule.

[0310] Generally, double stranded oligonucleotides are formed by the assembly of two distinct oligonucleotide sequences where the oligonucleotide sequence of one strand is complementary to the oligonucleotide sequence of the second strand; such double stranded oligonucleotides are assembled from two separate oligonucleotides, or from a single molecule that folds on itself to form a double stranded structure, often referred to in the field as hairpin stem-loop structure (e.g., shRNA or short hairpin RNA). These double stranded oligonucleotides known in the art all have a common feature in that each strand of the duplex has a distict nucleotide sequence.

[0311] Distinct from the double stranded nucleic acid molecules known in the art, the applicants have developed a novel, potentially cost effective and simplified method of forming a double stranded nucleic acid molecule starting from a single stranded or linear oligonucleotide. The two strands of the double stranded oligonucleotide formed according to the instant invention have the same nucleotide sequence and are not covalently linked to each other. Such double-stranded oligonucleotides molecules can be readily linked post-synthetically by methods and reagents known in the art and are within the scope of the invention. In one embodiment, the single stranded oligonucleotide of the invention (the duplex forming oligonucleotide) that forms a double stranded oligonucleotide comprises a first region and a second region, where the second region includes a nucleotide sequence that is an inverted repeat of the nucleotide sequence in the first region, or a portion thereof, such that the single stranded oligonucleotide self assembles to form a duplex oligonucleotide in which the nucleotide sequence of one strand of the duplex is the same as the nucleotide sequence of the second strand. Non-limiting examples of such duplex forming oligonucleotides are illustrated in FIGS. 14 and 15. These duplex forming oligonucleotides (DFOs) can optionally include certain palindrome or repeat sequences where such palindrome or repeat sequences are present in between the first region and the second region of the DFO.

[0312] In one embodiment, the invention features a duplex forming oligonucleotide (DFO) molecule, wherein the DFO comprises a duplex forming self complementary nucleic acid sequence that has nucleotide sequence complementary to a HCV target nucleic acid sequence. The DFO molecule can comprise a single self complementary sequence or a duplex resulting from assembly of such self complementary sequences.

[0313] In one embodiment, a duplex forming oligonucleotide (DFO) of the invention comprises a first region and a second region, wherein the second region comprises a nucleotide sequence comprising an inverted repeat of nucleotide sequence of the first region such that the DFO molecule can assemble into a double stranded oligonucleotide. Such double stranded oligonucleotides can act as a short interfering nucleic acid (siNA) to modulate gene expression. Each strand of the double stranded oligonucleotide duplex formed by DFO molecules of the invention can comprise a nucleotide sequence region that is complementary to the same nucleotide sequence in a target nucleic acid molecule (e.g., target HCV RNA).

[0314] In one embodiment, the invention features a single stranded DFO that can assemble into a double stranded oligonucleotide. The applicant has surprisingly found that a single stranded oligonucleotide with nucleotide regions of self complementarity can readily assemble into duplex oligonucleotide constructs. Such DFOs can assemble into duplexes that can inhibit gene expression in a sequence specific manner. The DFO moleucles of the invention comprise a first region with nucleotide sequence that is complementary to the nucleotide sequence of a second region and where the sequence of the first region is complementary to a target nucleic acid (e.g., RNA). The DFO can form a double stranded oligonucleotide wherein a portion of each strand of the double stranded oligonucleotide comprises a sequence complementary to a target nucleic acid sequence.

[0315] In one embodiment, the invention features a double stranded oligonucleotide, wherein the two strands of the double stranded oligonucleotide are not covalently linked to each other, and wherein each strand of the double stranded oligonucleotide comprises a nucleotide sequence that is complementary to the same nucleotide sequence in a target nucleic acid molecule or a portion thereof (e.g., HCV RNA target). In another embodiment, the two strands of the double stranded oligonucleotide share an identical nucleotide sequence of at least about 15, preferably at least about 16, 17, 18, 19, 20, or 21 nucleotides.

[0316] In one embodiment, a DFO molecule of the invention comprises a structure having Formula DFO-I:
5′-p-XZX′-3′
wherein Z comprises a palindromic or repeat nucleic acid sequence optionally with one or more modified nucleotides (e.g., nucleotide with a modified base, such as 2-amino purine, 2-amino-1,6-dihydro purine or a universal base), for example of length about 2 to about 24 nucleotides in even numbers (e.g., about 2, 4, 6, 8, 10, 12, 14, 16, 18, 20, or 22 or 24 nucleotides), X represents a nucleic acid sequence, for example of length between about 1 to about 21 nucleotides (e.g., about 1, 2, 3, 4, 5, 6, 7, 8, 9, 10, 11, 12, 13, 14, 15, 16, 17, 18, 19, 20, or 21 nucleotides), X′ comprises a nucleic acid sequence, for example of length about 1 and about 21 nucleotides (e.g., about 1, 2, 3, 4, 5, 6, 7, 8, 9, 10, 11, 12, 13, 14, 15, 16, 17, 18, 19, 20 or 21 nucleotides) having nucleotide sequence complementarity to sequence X or a portion thereof, p comprises a terminal phosphate group that can be present or absent, and wherein sequence X and Z, either independently or together, comprise nucleotide sequence that is complementary to a target nucleic acid sequence or a portion thereof and is of length sufficient to interact (e.g., base pair) with the target nucleic acid sequence or a portion thereof (e.g., HCV RNA target). For example, X independently can comprise a sequence from about 12 to about 21 or more (e.g., about 12, 13, 14, 15, 16, 17, 18, 19, 20, 21, or more) nucleotides in length that is complementary to nucleotide sequence in a target HCV RNA or a portion thereof. In another non-limiting example, the length of the nucleotide sequence of X and Z together, when X is present, that is complementary to the target RNA or a portion thereof (e.g., HCV RNA target) is from about 12 to about 21 or more nucleotides (e.g., about 12, 13, 14, 15, 16, 17, 18, 19, 20, 21, or more). In yet another non-limiting example, when X is absent, the length of the nucleotide sequence of Z that is complementary to the target HCV RNA or a portion thereof is from about 12 to about 24 or more nucleotides (e.g., about 12, 14, 16, 18, 20, 22, 24, or more). In one embodiment X, Z and X′ are independently oligonucleotides, where X and/or Z comprises a nucleotide sequence of length sufficient to interact (e.g., base pair) with a nucleotide sequence in the target RNA or a portion thereof (e.g., HCV RNA target). In one embodiment, the lengths of oligonucleotides X and X′ are identical. In another embodiment, the lengths of oligonucleotides X and X′ are not identical. In another embodiment, the lengths of oligonucleotides X and Z, or Z and X′, or X, Z and X′ are either identical or different.

[0317] When a sequence is described in this specification as being of “sufficient” length to interact (i.e., base pair) with another sequence, it is meant that the the length is such that the number of bonds (e.g., hydrogen bonds) formed between the two sequences is enough to enable the two sequence to form a duplex under the conditions of interest. Such conditions can be in vitro (e.g., for diagnostic or assay purposes) or in vivo (e.g., for therapeutic purposes). It is a simple and routine matter to determine such lengths.

[0318] In one embodiment, the invention features a double stranded oligonucleotide construct having Formula DFO-I(a):

5′-p-X Z X′-3′
3′-X′ Z X-p-5′

wherein Z comprises a palindromic or repeat nucleic acid sequence or palindromic or repeat-like nucleic acid sequence with one or more modified nucleotides (e.g., nucleotides with a modified base, such as 2-amino purine, 2-amino-1,6-dihydro purine or a universal base), for example of length about 2 to about 24 nucleotides in even numbers (e.g., about 2, 4, 6, 8, 10, 12, 14, 16, 18, 20, 22 or 24 nucleotides), X represents a nucleic acid sequence, for example of length about 1 to about 21 nucleotides (e.g., about 1, 2, 3, 4, 5, 6, 7, 8, 9, 10, 11, 12, 13, 14, 15, 16, 17, 18, 19, 20, or 21 nucleotides), X′ comprises a nucleic acid sequence, for example of length about 1 to about 21 nucleotides (e.g., about 1, 2, 3, 4, 5, 6, 7, 8, 9, 10, 11, 12, 13, 14, 15, 16, 17, 18, 19, 20 or 21 nucleotides) having nucleotide sequence complementarity to sequence X or a portion thereof, p comprises a terminal phosphate group that can be present or absent, and wherein each X and Z independently comprises a nucleotide sequence that is complementary to a target nucleic acid sequence or a portion thereof (e.g., HCV RNA target) and is of length sufficient to interact with the target nucleic acid sequence of a portion thereof (e.g., HCV RNA target). For example, sequence X independently can comprise a sequence from about 12 to about 21 or more nucleotides (e.g., about 12, 13, 14, 15, 16, 17, 18, 19, 20, 21, or more) in length that is complementary to a nucleotide sequence in a target RNA or a portion thereof (e.g., HCV RNA target). In another non-limiting example, the length of the nucleotide sequence of X and Z together (when X is present) that is complementary to the target HCV RNA or a portion thereof is from about 12 to about 21 or more nucleotides (e.g., about 12, 13, 14, 15, 16, 17, 18, 19, 20, 21, or more). In yet another non-limiting example, when X is absent, the length of the nucleotide sequence of Z that is complementary to the target HCV RNA or a portion thereof is from about 12 to about 24 or more nucleotides (e.g., about 12, 14, 16, 18, 20, 22, 24 or more). In one embodiment X, Z and X′ are independently oligonucleotides, where X and/or Z comprises a nucleotide sequence of length sufficient to interact (e.g., base pair) with nucleotide sequence in the target RNA or a portion thereof (e.g., HCV RNA target). In one embodiment, the lengths of oligonucleotides X and X′ are identical. In another embodiment, the lengths of oligonucleotides X and X′ are not identical. In another embodiment, the lengths of oligonucleotides X and Z or Z and X′ or X, Z and X′ are either identical or different. In one embodiment, the double stranded oligonucleotide construct of Formula I(a) includes one or more, specifically 1, 2, 3 or 4, mismatches, to the extent such mismatches do not significantly diminish the ability of the double stranded oligonucleotide to inhibit target gene expression.

[0319] In one embodiment, a DFO molecule of the invention comprises structure having Formula DFO-II:
5′-p-XX′-3′
wherein each X and X′ are independently oligonucleotides of length about 12 nucleotides to about 21 nucleotides, wherein X comprises, for example, a nucleic acid sequence of length about 12 to about 21 nucleotides (e.g., about 12, 13, 14, 15, 16, 17, 18, 19, 20 or 21 nucleotides), X′ comprises a nucleic acid sequence, for example of length about 12 to about 21 nucleotides (e.g., about 12, 13, 14, 15, 16, 17, 18, 19, 20, or 21 nucleotides) having nucleotide sequence complementarity to sequence X or a portion thereof, p comprises a terminal phosphate group that can be present or absent, and wherein X comprises a nucleotide sequence that is complementary to a target nucleic acid sequence (e.g., HCV RNA) or a portion thereof and is of length sufficient to interact (e.g., base pair) with the target nucleic acid sequence of a portion thereof. In one embodiment, the length of oligonucleotides X and X′ are identical. In another embodiment the length of oligonucleotides X and X′ are not identical. In one embodiment, length of the oligonucleotides X and X′ are sufficint to form a relatively stable double stranded oligonucleotide.

[0320] In one embodiment, the invention features a double stranded oligonucleotide construct having Formula DFO-II(a):

5′-p-X X′-3′
3′-X′ X-p-5′

wherein each X and X′ are independently oligonucleotides of length about 12 nucleotides to about 21 nucleotides, wherein X comprises a nucleic acid sequence, for example of length about 12 to about 21 nucleotides (e.g., about 12, 13, 14, 15, 16, 17, 18, 19, 20 or 21 nucleotides), X′ comprises a nucleic acid sequence, for example of length about 12 to about 21 nucleotides (e.g., about 12, 13, 14, 15, 16, 17, 18, 19, 20 or 21 nucleotides) having nucleotide sequence complementarity to sequence X or a portion thereof, p comprises a terminal phosphate group that can be present or absent, and wherein X comprises nucleotide sequence that is complementary to a target nucleic acid sequence or a portion thereof (e.g., HCV RNA target) and is of length sufficient to interact (e.g., base pair) with the target nucleic acid sequence (e.g., HCV RNA) or a portion thereof. In one embodiment, the lengths of oligonucleotides X and X′ are identical. In another embodiment, the lengths of oligonucleotides X and X′ are not identical. In one embodiment, the lengths of the oligonucleotides X and X′ are sufficint to form a relatively stable double stranded oligonucleotide. In one embodiment, the double stranded oligonucleotide construct of Formula 11(a) includes one or more, specifically 1, 2, 3 or 4, mismatches, to the extent such mismatches do not significantly diminish the ability of the double stranded oligonucleotide to inhibit target gene expression.

[0321] In one embodiment, the invention features a DFO molecule having Formula DFO-I(b):
5′-p-Z-3′
where Z comprises a palindromic or repeat nucleic acid sequence optionally including one or more non-standard or modified nucleotides (e.g., nucleotide with a modified base, such as 2-amino purine or a universal base) that can facilitate base-pairing with other nucleotides. Z can be, for example, of length sufficient to interact (e.g., base pair) with nucleotide sequence of a target nucleic acid (e.g., HCV RNA) molecule, preferably of length of at least 12 nucleotides, specifically about 12 to about 24 nucleotides (e.g., about 12, 14, 16, 18, 20, 22 or 24 nucleotides). p represents a terminal phosphate group that can be present or absent.

[0322] In one embodiment, a DFO molecule having any of Formula DFO-I, DFO-I(a), DFO-I(b), DFO-II(a) or DFO-II can comprise chemical modifications as described herein without limitation, such as, for example, nucleotides having any of Formulae I-VII, stabilization chemistries as described in Table IV, or any other combination of modified nucleotides and non-nucleotides as described in the various embodiments herein.

[0323] In one embodiment, the palidrome or repeat sequence or modified nucleotide (e.g., nucleotide with a modified base, such as 2-amino purine or a universal base) in Z of DFO constructs having Formula DFO-I, DFO-I(a) and DFO-I(b), comprises chemically modified nucleotides that are able to interact with a portion of the target nucleic acid sequence (e.g., modified base analogs that can form Watson Crick base pairs or non-Watson Crick base pairs).

[0324] In one embodiment, a DFO molecule of the invention, for example a DFO having Formula DFO-I or DFO-II, comprises about 15 to about 40 nucleotides (e.g., about 15, 16, 17, 18, 19, 20, 21, 22, 23, 24, 25, 26, 27, 28, 29, 30, 31, 32, 33, 34, 35, 36, 37, 38, 39, or 40 nucleotides). In one embodiment, a DFO molecule of the invention comprises one or more chemical modifications. In a non-limiting example, the introduction of chemically modified nucleotides and/or non-nucleotides into nucleic acid molecules of the invention provides a powerful tool in overcoming potential limitations of in vivo stability and bioavailability inherent to unmodified RNA molecules that are delivered exogenously. For example, the use of chemically modified nucleic acid molecules can enable a lower dose of a particular nucleic acid molecule for a given therapeutic effect since chemically modified nucleic acid molecules tend to have a longer half-life in serum or in cells or tissues. Furthermore, certain chemical modifications can improve the bioavailability and/or potency of nucleic acid molecules by not only enhancing half-life but also facilitating the targeting of nucleic acid molecules to particular organs, cells or tissues and/or improving cellular uptake of the nucleic acid molecules. Therefore, even if the activity of a chemically modified nucleic acid molecule is reduced in vitro as compared to a native/unmodified nucleic acid molecule, for example when compared to an unmodified RNA molecule, the overall activity of the modified nucleic acid molecule can be greater than the native or unmodified nucleic acid molecule due to improved stability, potency, duration of effect, bioavailability and/or delivery of the molecule.

[0325] Multifunctional or Multi-Targeted siNA Molecules of the Invention In one embodiment, the invention features siNA molecules comprising multifunctional short interfering nucleic acid (multifunctional siNA) molecules that modulate the expression of one or more genes in a biologic system, such as a cell, tissue, or organism. The multifunctional short interfering nucleic acid (multifunctional siNA) molecules of the invention can target more than one region of the HCV or cellular/host target nucleic acid sequence or can target sequences of more than one distinct target nucleic acid molecules (e.g., HCV RNA or cellular/host RNA targets). The multifunctional siNA molecules of the invention can be chemically synthesized or expressed from transcription units and/or vectors. The multifunctional siNA molecules of the instant invention provide useful reagents and methods for a variety of human applications, therapeutic, diagnostic, agricultural, veterinary, target validation, genomic discovery, genetic engineering and pharmacogenomic applications.

[0326] Applicant demonstrates herein that certain oligonucleotides, refered to herein for convenience but not limitation as multifunctional short interfering nucleic acid or multifunctional siNA molecules, are potent mediators of sequence specific regulation of gene expression. The multifunctional siNA molecules of the invention are distinct from other nucleic acid sequences known in the art (e.g., siRNA, miRNA, stRNA, shRNA, antisense oligonucleotides, etc.) in that they represent a class of polynucleotide molecules that are designed such that each strand in the multifunctional siNA construct comprises a nucleotide sequence that is complementary to a distinct nucleic acid sequence in one or more target nucleic acid molecules. A single multifunctional siNA molecule (generally a double-stranded molecule) of the invention can thus target more than one (e.g., 2, 3, 4, 5, or more) differing target nucleic acid target molecules. Nucleic acid molecules of the invention can also target more than one (e.g., 2, 3, 4, 5, or more) region of the same target nucleic acid sequence. As such multifunctional siNA molecules of the invention are useful in down regulating or inhibiting the expression of one or more target nucleic acid molecules. For example, a multifunctional siNA molecule of the invention can target nucleic acid molecules encoding a virus or viral proteins and corresponding cellular proteins required for viral infection and/or replication, or differing strains of a particular virus (e.g., HCV). By reducing or inhibiting expression of more than one target nucleic acid molecule with one multifunctional siNA construct, multifunctional siNA molecules of the invention represent a class of potent therapeutic agents that can provide simultaneous inhibition of multiple targets within a disease or pathogen related pathway. Such simultaneous inhibition can provide synergistic therapeutic treatment strategies without the need for separate preclinical and clinical development efforts or complex regulatory approval process.

[0327] Use of multifunctional siNA molecules that target more then one region of a target nucleic acid molecule (e.g., messenger RNA or HCV RNA) is expected to provide potent inhibition of gene expression. For example, a single multifunctional siNA construct of the invention can target both conserved and variable regions of a target nucleic acid molecule (e.g., HCV RNA), thereby allowing down regulation or inhibition of different strain variants or a virus, or splice variants encoded by a single host gene, or allowing for targeting of both coding and non-coding regions of the host target nucleic acid molecule.

[0328] Generally, double stranded oligonucleotides are formed by the assembly of two distinct oligonucleotides where the oligonucleotide sequence of one strand is complementary to the oligonucleotide sequence of the second strand; such double stranded oligonucleotides are generally assembled from two separate oligonucleotides (e.g., siRNA). Alternately, a duplex can be formed from a single molecule that folds on itself (e.g., shRNA or short hairpin RNA). These double stranded oligonucleotides are known in the art to mediate RNA interference and all have a common feature wherein only one nucleotide sequence region (guide sequence or the antisense sequence) has complementarity to a target nucleic acid sequence (e.g., HCV or host RNA) and the other strand (sense sequence) comprises nucleotide sequence that is homologous to the target nucleic acid sequence. Generally, the antisense sequence is retained in the active RISC complex and guides the RISC to the target nucleotide sequence by means of complementary base-pairing of the antisense sequence with the target seqeunce for mediating sequence-specific RNA interference. It is known in the art that in some cell culture systems, certain types of unmodified siRNAs can exhibit “off target” effects. It is hypothesized that this off-target effect involves the participation of the sense sequence instead of the antisense sequence of the siRNA in the RISC complex (see for example Schwarz et al., 2003, Cell, 115, 199-208). In this instance the sense sequence is believed to direct the RISC complex to a sequence (off-target sequence) that is distinct from the intended target sequence, resulting in the inhibition of the off-target sequence. In these double stranded nucleic acid molecules, each strand is complementary to a distinct target nucleic acid sequence. However, the off-targets that are affected by these dsRNAs are not entirely predictable and are non-specific.

[0329] Distinct from the double stranded nucleic acid molecules known in the art, the applicants have developed a novel, potentially cost effective and simplified method of down regulating or inhibiting the expression of more than one target nucleic acid sequence using a single multifunctional siNA construct. The multifunctional siNA molecules of the invention are designed to be double-stranded or partially double stranded, such that a portion of each strand or region of the multifunctional siNA is complementary to a target nucleic acid sequence of choice. As such, the multifunctional siNA molecules of the invention are not limited to targeting sequences that are complementary to each other, but rather to any two differing target nucleic acid sequences. Multifunctional siNA molecules of the invention are designed such that each strand or region of the multifunctional siNA molecule, that is complementary to a given target nucleic acid sequence, is of suitable length (e.g., from about 16 to about 28 nucleotides in length, preferably from about 18 to about 28 nucleotides in length) for mediating RNA interference against the target nucleic acid sequence. The complementarity between the target nucleic acid sequence and a strand or region of the multifunctional siNA must be sufficient (at least about 8 base pairs) for cleavage of the target nucleic acid sequence by RNA interference multifunctional siNA of the invention is expected to minimize off-target effects seen with certain siRNA sequences, such as those described in (Schwarz et al., supra).

[0330] It has been reported that dsRNAs of length between 29 base pairs and 36 base pairs (Tuschl et al., International PCT Publication No. WO 02/44321) do not mediate RNAi. One reason these dsRNAs are inactive may be the lack of turnover or dissociation of the strand that interacts with the target RNA sequence, such that the RISC complex is not able to efficiently interact with multiple copies of the target RNA resulting in a significant decrease in the potency and efficiency of the RNAi process. Applicant has surprisingly found that the multifunctional siNAs of the invention can overcome this hurdle and are capable of enhancing the efficiency and potency of RNAi process. As such, in certain embodiments of the invention, multifunctional siNAs of length between about 29 to about 36 base pairs can be designed such that, a portion of each strand of the multifunctional siNA molecule comprises a nucleotide sequence region that is complementary to a target nucleic acid of length sufficient to mediate RNAi efficiently (e.g., about 15 to about 23 base pairs) and a nucleotide sequence region that is not complementary to the target nucleic acid. By having both complementary and non-complementary portions in each strand of the multifunctional siNA, the multifunctional siNA can mediate RNA interference against a target nucleic acid sequence without being prohibitive to turnover or dissociation (e.g., where the length of each strand is too long to mediate RNAi against the respective target nucleic acid sequence). Furthermore, design of multifunctional siNA molecules of the invention with internal overlapping regions allows the multifunctional siNA molecules to be of favorable (decreased) size for mediating RNA interference and of size that is well suited for use as a therapeutic agent (e.g., wherein each strand is independently from about 18 to about 28 nucleotides in length). Non-limiting examples are lillustrated in the enclosed FIGS. 16-21 and 42.

[0331] In one embodiment, a multifunctional siNA molecule of the invention comprises a first region and a second region, where the first region of the multifunctional siNA comprises a nucleotide sequence complementary to a nucleic acid sequence of a first target nucleic acid molecule, and the second region of the multifunctional siNA comprises nucleic acid sequence complementary to a nucleic acid sequence of a second target nucleic acid molecule. In one embodiment, a multifunctional siNA molecule of the invention comprises a first region and a second region, where the first region of the multifunctional siNA comprises nucleotide sequence complementary to a nucleic acid sequence of the first region of a target nucleic acid molecule, and the second region of the multifunctional siNA comprises nucleotide sequence complementary to a nucleic acid sequence of a second region of a the target nucleic acid molecule. In another embodiment, the first region and second region of the multifunctional siNA can comprise separate nucleic acid sequences that share some degree of complementarity (e.g., from about 1 to about 10 complementary nucleotides). In certain embodiments, multifunctional siNA constructs comprising separate nucleic acid seqeunces can be readily linked post-synthetically by methods and reagents known in the art and such linked constructs are within the scope of the invention. Alternately, the first region and second region of the multifunctional siNA can comprise a single nucleic acid sequence having some degree of self complementarity, such as in a hairpin or stem-loop structure. Non-limiting examples of such double stranded and hairpin multifunctional short interfering nucleic acids are illustrated in FIGS. 16 and 17 respectively. These multifunctional short interfering nucleic acids (multifunctional siNAs) can optionally include certain overlapping nucleotide sequence where such overlapping nucleotide sequence is present in between the first region and the second region of the multifunctional siNA (see for example FIGS. 18 and 19).

[0332] In one embodiment, the invention features a multifunctional short interfering nucleic acid (multifunctional siNA) molecule, wherein each strand of the the multifunctional siNA independently comprises a first region of nucleic acid sequence that is complementary to a distinct target nucleic acid sequence and the second region of nucleotide sequence that is not complementary to the target sequence. The target nucleic acid sequence of each strand is in the same target nucleic acid molecule or different target nucleic acid molecules.

[0333] In another embodiment, the multifunctional siNA comprises two strands, where: (a) the first strand comprises a region having sequence complementarity to a target nucleic acid sequence (complementary region 1) and a region having no sequence complementarity to the target nucleotide sequence (non-complementary region 1); (b) the second strand of the multifunction siNA comprises a region having sequence complementarity to a target nucleic acid sequence that is distinct from the target nucleotide sequence complementary to the first strand nucleotide sequence (complementary region 2), and a region having no sequence complementarity to the target nucleotide sequence of complementary region 2 (non-complementary region 2); (c) the complementary region 1 of the first strand comprises a nucleotide sequence that is complementary to a nucleotide sequence in the non-complementary region 2 of the second strand and the complementary region 2 of the second strand comprises a nucleotide sequence that is complementary to a nucleotide sequence in the non-complementary region 1 of the first strand. The target nucleic acid sequence of complementary region 1 and complementary region 2 is in the same target nucleic acid molecule or different target nucleic acid molecules.

[0334] In another embodiment, the multifunctional siNA comprises two strands, where: (a) the first strand comprises a region having sequence complementarity to a target nucleic acid sequence derived from a gene (e.g., HCV or host gene) (complementary region 1) and a region having no sequence complementarity to the target nucleotide sequence of complementary region 1 (non-complementary region 1); (b) the second strand of the multifunction siNA comprises a region having sequence complementarity to a target nucleic acid sequence derived from a gene that is distinct from the gene of complementary region 1 (complementary region 2), and a region having no sequence complementarity to the target nucleotide sequence of complementary region 2 (non-complementary region 2); (c) the complementary region 1 of the first strand comprises a nucleotide sequence that is complementary to a nucleotide sequence in the non-complementary region 2 of the second strand and the complementary region 2 of the second strand comprises a nucleotide sequence that is complementary to a nucleotide sequence in the non-complementary region 1 of the first strand.

[0335] In another embodiment, the multifunctional siNA comprises two strands, where: (a) the first strand comprises a region having sequence complementarity to a target nucleic acid sequence derived from a gene (e.g., HCV or host gene) (complementary region 1) and a region having no sequence complementarity to the target nucleotide sequence of complementary region 1 (non-complementary region 1); (b) the second strand of the multifunction siNA comprises a region having sequence complementarity to a target nucleic acid sequence distinct from the target nucleic acid sequence of complementary region 1(complementary region 2), provided, however, that the target nucleic acid sequence for complementary region 1 and target nucleic acid sequence for complementary region 2 are both derived from the same gene, and a region having no sequence complementarity to the target nucleotide sequence of complementary region 2 (non-complementary region 2); (c) the complementary region 1 of the first strand comprises a nucleotide sequence that is complementary to a nucleotide sequence in the non-complementary region 2 of the second strand and the complementary region 2 of the second strand comprises a nucleotide sequence that is complementary to nucleotide sequence in the non-complementary region 1 of the first strand.

[0336] In one embodiment, the invention features a multifunctional short interfering nucleic acid (multifunctional siNA) molecule, wherein the multifunctional siNA comprises two complementary nucleic acid sequences in which the first sequence comprises a first region having nucleotide sequence complementary to nucleotide sequence within a target nucleic acid molecule, and in which the second seqeunce comprises a first region having nucleotide sequence complementary to a distinct nucleotide sequence within the same target nucleic acid molecule. Preferably, the first region of the first sequence is also complementary to the nucleotide sequence of the second region of the second sequence, and where the first region of the second sequence is complementary to the nucleotide sequence of the second region of the first sequence,

[0337] In one embodiment, the invention features a multifunctional short interfering nucleic acid (multifunctional siNA) molecule, wherein the multifunctional siNA comprises two complementary nucleic acid sequences in which the first sequence comprises a first region having a nucleotide sequence complementary to a nucleotide sequence within a first target nucleic acid molecule, and in which the second seqeunce comprises a first region having a nucleotide sequence complementary to a distinct nucleotide sequence within a second target nucleic acid molecule. Preferably, the first region of the first sequence is also complementary to the nucleotide sequence of the second region of the second sequence, and where the first region of the second sequence is complementary to the nucleotide sequence of the second region of the first sequence,

[0338] In one embodiment, the invention features a multifunctional siNA molecule comprising a first region and a second region, where the first region comprises a nucleic acid sequence having about 18 to about 28 nucleotides complementary to a nucleic acid sequence within a first target nucleic acid molecule, and the second region comprises nucleotide sequence having about 18 to about 28 nucleotides complementary to a distinct nucleic acid sequence within a second target nucleic acid molecule.

[0339] In one embodiment, the invention features a multifunctional siNA molecule comprising a first region and a second region, where the first region comprises nucleic acid sequence having about 18 to about 28 nucleotides complementary to a nucleic acid sequence within a target nucleic acid molecule, and the second region comprises nucleotide sequence having about 18 to about 28 nucleotides complementary to a distinct nucleic acid sequence within the same target nucleic acid molecule.

[0340] In one embodiment, the invention features a double stranded multifunctional short interfering nucleic acid (multifunctional siNA) molecule, wherein one strand of the multifunctional siNA comprises a first region having nucleotide sequence complementary to a first target nucleic acid sequence, and the second strand comprises a first region having a nucleotide sequence complementary to a second target nucleic acid sequence. The first and second target nucleic acid sequences can be present in separate target nucleic acid molecules or can be different regions within the same target nucleic acid molecule. As such, multifunctional siNA molecules of the invention can be used to target the expression of different genes, splice variants of the same gene, both mutant and conserved regions of one or more gene transcripts, or both coding and non-coding sequences of the same or differeing genes or gene transcripts.

[0341] In one embodiment, a target nucleic acid molecule of the invention encodes a single protein. In another embodiment, a target nucleic acid molecule encodes more than one protein (e.g., 1, 2, 3, 4, 5 or more proteins). As such, a multifunctional siNA construct of the invention can be used to down regulate or inhibit the expression of several proteins. For example, a multifunctional siNA molecule comprising a region in one strand having nucleotide sequence complementarity to a first target nucleic acid sequence derived from a viral genome (e.g., HCV) and the second strand comprising a region with nucleotide sequence complementarity to a second target nucleic acid sequence present in target nucleic acid molecules derived from genes encoding two proteins (e.g., two differing host proteins involved in the HCV life-cycle) can be used to down regulate, inhibit, or shut down a particular biologic pathway by targeting, for example, a viral RNA (e.g., HCV RNA) and one or more host RNAs that are involved in viral infection or the viral life-cycle (e.g., La antigen or interferon regulatory factors).

[0342] In another non-limiting example, a multifunctional siNA molecule comprising a region in one strand having a nucleotide sequence complementarity to a first target nucleic acid sequence derived from a target nucleic acid molecule encoding a virus or a viral protein (e.g., HIV) and the second strand comprising a region having a nucleotide sequence complementarity to a second target nucleic acid sequence present in target nucleic acid molecule encoding a cellular protein (e.g., a receptor for the virus, such as CCR5 receptor for HIV) can be used to down regulate, inhibit, or shut down the viral replication and infection by targeting the virus and cellular proteins necessary for viral infection or replication.

[0343] In another nonlimiting example, a multifunctional siNA molecule comprising a region in one strand having a nucleotide sequence complementarity to a first target nucleic acid sequence (e.g., conserved sequence) present in a target nucleic acid molecule such as a viral genome (e.g., HCV RNA) and the second strand comprising a region having a nucleotide sequence complementarity to a second target nucleic acid sequence (e.g., conserved sequence) present in target nucleic acid molecule derived from a gene encoding a viral protein (e.g., HCV proteins) to down regulate, inhibit, or shut down the viral replication and infection by targeting the viral genome and viral encoded proteins necessary for viral infection or replication.

[0344] In one embodiment the invention takes advantage of conserved nucleotide sequences present in different strains, isotypes or forms of a virus and genes encoded by these different strains, isotypes and forms of the virus (e.g., HCV). By designing multifunctional siNAs in a manner where one strand includes a sequence that is complementary to target nucleic acid sequence conserved among various strains, isotypes or forms of a virus and the other strand includes sequence that is complementary to target nucleic acid sequence conserved in a protein encoded by the virus, it is possible to selectively and effectively inhibit viral replication or infection using a single multifunctional siNA.

[0345] In one embodiment, a multifunctional short interfering nucleic acid (multifunctional siNA) of the invention comprises a first region and a second region, wherein the first region comprises nucleotide sequence complementary to a HCV viral RNA of a first viral strain and the second region comprises nucleotide sequence complementary to a HCV viral RNA of a second viral strain. In one embodiment, the first and second regions can comprise nucleotide sequence complementary to shared or conserved RNA sequences of differing viral strains or classes or viral strains.

[0346] In one embodiment, a multifunctional short interfering nucleic acid (multifunctional siNA) of the invention comprises a first region and a second region, wherein the first region comprises a nucleotide sequence complementary to a HCV viral RNA encoding one or more HCV viruses (e.g., one or more strains of HCV) and the second region comprises a nucleotide sequence complementary to a viral RNA encoding one or more interferon agonist proteins. In one embodiment, the first region can comprise a nucleotide sequence complementary to shared or conserved RNA sequences of differing HCV viral strains or classes of HCV viral strains. Non-limiting example of interferon agonist proteins include any protein that is capable of inhibition or suppressing RNA silencing (e.g., RNA binding proteins such as E3L or NS1 or equivalents thereof, see for example Li et al., 2004, PNAS, 101, 1350-1355)

[0347] In one embodiment, a multifunctional short interfering nucleic acid (multifunctional siNA) of the invention comprises a first region and a second region, wherein the first region comprises nucleotide sequence complementary to a HCV viral RNA and the second region comprises nucleotide sequence complementary to a cellular RNA that is involved in HCV viral infection and/or replication. Non-limiting examples of cellular RNAs involved in viral infection and/or replication include cellular receptors, cell surface molecules, cellular enzymes, cellular transcription factors, and/or cytokines, second messengers, and cellular accessory molecules including, but not limited to, La antigen, FAS, interferon agonsit proteins (e.g., E3L or NS1 or equivalents thereof, see for example Li et al., 2004, PNAS, 101, 1350-1355), interferon regulatory factors (IRFs); cellular PKR protein kinase (PKR); human eukaryotic initiation factors 2B (elF2B gamma and/or elF2gamma); human DEAD Box protein (DDX3); and cellular proteins that bind to the poly(U) tract of the HCV 3′-UTR, such as polypyrimidine tract-binding protein.

[0348] In one embodiment, a double stranded multifunctional siNA molecule of the invention comprises a structure having Formula MF-I:

5′-p-X Z X′-3′
3′-Y′ Z Y-p-5′

wherein each 5′-p-XZX′-3′ and 5′-p-YZY′-3′ are independently an oligonucleotide of length about 20 nucleotides to about 300 nucleotides, preferably about 20 to about 200 nucleotides, about 20 to about 100 nucleotides, about 20 to about 40 nucleotides, about 20 to about 40 nucleotides, about 24 to about 38 nucleotides, or about 26 to about 38 nucleotides; XZ comprises a nucleic acid sequence that is complementary to a first HCV target nucleic acid sequence; YZ is an oligonucleotide comprising nucleic acid sequence that is complementary to a second HCV target nucleic acid sequence; Z comprises nucleotide sequence of length about 1 to about 24 nucleotides (e.g., about 1, 2, 3, 4, 5, 6, 7, 8, 9, 10, 11, 12, 13, 14, 15, 16, 17, 18, 19, 20, 21, 22, 23, or 24 nucleotides) that is self complementary; X comprises nucleotide sequence of length about 1 to about 100 nucleotides, preferably about 1 to about 21 nucleotides (e.g., about 1, 2, 3, 4, 5, 6, 7, 8, 9, 10, 11, 12, 13, 14, 15, 16, 17, 18, 19, 20, or 21 nucleotides) that is complementary to nucleotide sequence present in region Y′; Y comprises nucleotide sequence of length about 1 to about 100 nucleotides, preferably about 1 to about 21 nucleotides (e.g., about 1, 2, 3, 4, 5, 6, 7, 8, 9, 10, 11, 12, 13, 14, 15, 16, 17, 18, 19, 20 or 21 nucleotides) that is complementary to nucleotide sequence present in region X′; each p comprises a terminal phosphate group that is independently present or absent; each XZ and YZ is independently of length sufficient to stably interact (i.e., base pair) with the first and second target nucleic acid sequence, respectively, or a portion thereof. For example, each sequence X and Y can independently comprise sequence from about 12 to about 21 or more nucleotides in length (e.g., about 12, 13, 14, 15, 16, 17, 18, 19, 20, 21, or more) that is complementary to a target nucleotide sequence in different target nucleic acid molecules, such as target RNAs or a portion thereof. In another non-limiting example, the length of the nucleotide sequence of X and Z together that is complementary to the first HCV target nucleic acid sequence or a portion thereof is from about 12 to about 21 or more nucleotides (e.g., about 12, 13, 14, 15, 16, 17, 18, 19, 20, 21, or more). In another non-limiting example, the length of the nucleotide sequence of Y and Z together, that is complementary to the second HCV target nucleic acid sequence or a portion thereof is from about 12 to about 21 or more nucleotides (e.g., about 12, 13, 14, 15, 16, 17, 18, 19, 20, 21, or more). In one embodiment, the first HCV target nucleic acid sequence and the second HCV target nucleic acid sequence are present in the same target nucleic acid molecule (e.g., HCV RNA or host RNA). In another embodiment, the first HCV target nucleic acid sequence and the second HCV target nucleic acid sequence are present in different target nucleic acid molecules (e.g., HCV RNA and host RNA). In one embodiment, Z comprises a palindrome or a repeat sequence. In one embodiment, the lengths of oligonucleotides X and X′ are identical. In another embodiment, the lengths of oligonucleotides X and X′ are not identical. In one embodiment, the lengths of oligonucleotides Y and Y′ are identical. In another embodiment, the lengths of oligonucleotides Y and Y′ are not identical. In one embodiment, the double stranded oligonucleotide construct of Formula I(a) includes one or more, specifically 1, 2, 3 or 4, mismatches, to the extent such mismatches do not significantly diminish the ability of the double stranded oligonucleotide to inhibit target gene expression.

[0349] In one embodiment, a multifunctional siNA molecule of the invention comprises a structure having Formula MF-II:

| | |
|---|---|
| 5′-p-X X′-3′ | - |
| 3′-Y′ Y-p-5′ | |

wherein each 5′-p-XX′-3′ and 5′-p-YY′-3′ are independently an oligonucleotide of length about 20 nucleotides to about 300 nucleotides, preferably about 20 to about 200 nucleotides, about 20 to about 100 nucleotides, about 20 to about 40 nucleotides, about 20 to about 40 nucleotides, about 24 to about 38 nucleotides, or about 26 to about 38 nucleotides; X comprises a nucleic acid sequence that is complementary to a first target nucleic acid sequence; Y is an oligonucleotide comprising nucleic acid sequence that is complementary to a second target nucleic acid sequence; X comprises a nucleotide sequence of length about 1 to about 100 nucleotides, preferably about 1 to about 21 nucleotides (e.g., about 1, 2, 3, 4, 5, 6, 7, 8, 9, 10, 11, 12, 13, 14, 15, 16, 17, 18, 19, 20, or 21 nucleotides) that is complementary to nucleotide sequence present in region Y′; Y comprises nucleotide sequence of length about 1 to about 100 nucleotides, preferably about 1 to about 21 nucleotides (e.g., about 1, 2, 3, 4, 5, 6, 7, 8, 9, 10, 11, 12, 13, 14, 15, 16, 17, 18, 19, 20 or 21 nucleotides) that is complementary to nucleotide sequence present in region X′; each p comprises a terminal phosphate group that is independently present or absent; each X and Y independently is of length sufficient to stably interact (i.e., base pair) with the first and second target nucleic acid sequence, respectively, or a portion thereof. For example, each sequence X and Y can independently comprise sequence from about 12 to about 21 or more nucleotides in length (e.g., about 12, 13, 14, 15, 16, 17, 18, 19, 20, 21, or more) that is complementary to a target nucleotide sequence in different target nucleic acid molecules, such as HCV target RNAs or a portion thereof. In one embodiment, the first HCV target nucleic acid sequence and the second HCV target nucleic acid sequence are present in the same target nucleic acid molecule (e.g., HCV RNA or host RNA). In another embodiment, the first HCV target nucleic acid sequence and the second HCV target nucleic acid sequence are present in different target nucleic acid molecules (e.g., HCV RNA and host RNA). In one embodiment, Z comprises a palindrome or a repeat sequence. In one embodiment, the lengths of oligonucleotides X and X′ are identical. In another embodiment, the lengths of oligonucleotides X and X′ are not identical. In one embodiment, the lengths of oligonucleotides Y and Y′ are identical. In another embodiment, the lengths of oligonucleotides Y and Y′ are not identical. In one embodiment, the double stranded oligonucleotide construct of Formula I(a) includes one or more, specifically 1, 2, 3 or 4, mismatches, to the extent such mismatches do not significantly diminish the ability of the double stranded oligonucleotide to inhibit target gene expression.

[0350] In one embodiment, a multifunctional siNA molecule of the invention comprises a structure having Formula MF-III:

X X′
Y′-W-Y

wherein each X, X′, Y, and Y′ is independently an oligonucleotide of length about 15 nucleotides to about 50 nucleotides, preferably about 18 to about 40 nucleotides, or about 19 to about 23 nucleotides; X comprises nucleotide sequence that is complementary to nucleotide sequence present in region Y′; X′ comprises nucleotide sequence that is complementary to nucleotide sequence present in region Y; each X and X′ is independently of length sufficient to stably interact (i.e., base pair) with a first and a second HCV target nucleic acid sequence, respectively, or a portion thereof; W represents a nucleotide or non-nucleotide linker that connects sequences Y′ and Y; and the multifunctional siNA directs cleavage of the first and second HCV target sequence via RNA interference. In one embodiment, the first HCV target nucleic acid sequence and the second HCV target nucleic acid sequence are present in the same target nucleic acid molecule (e.g., HCV RNA or host RNA). In another embodiment, the first HCV target nucleic acid sequence and the second HCV target nucleic acid sequence are present in different target nucleic acid molecules (e.g., HCV RNA and host RNA). In one embodiment, region W connects the 3′-end of sequence Y′ with the 3′-end of sequence Y. In one embodiment, region W connects the 3′-end of sequence Y′ with the 5′-end of sequence Y. In one embodiment, region W connects the 5′-end of sequence Y′ with the 5′-end of sequence Y. In one embodiment, region W connects the 5′-end of sequence Y′ with the 3′-end of sequence Y. In one embodiment, a terminal phosphate group is present at the 5′-end of sequence X. In one embodiment, a terminal phosphate group is present at the 5′-end of sequence X′. In one embodiment, a terminal phosphate group is present at the 5′-end of sequence Y. In one embodiment, a terminal phosphate group is present at the 5′-end of sequence Y′. In one embodiment, W connects sequences Y and Y′ via a biodegradable linker. In one embodiment, W further comprises a conjugate, lable, aptamer, ligand, lipid, or polymer.

[0351] In one embodiment, a multifunctional siNA molecule of the invention comprises a structure having Formula MF-IV:

X X′
Y′-X-Y

wherein each X, X′, Y, and Y′ is independently an oligonucleotide of length about 15 nucleotides to about 50 nucleotides, preferably about 18 to about 40 nucleotides, or about 19 to about 23 nucleotides; X comprises nucleotide sequence that is complementary to nucleotide sequence present in region Y′; X′ comprises nucleotide sequence that is complementary to nucleotide sequence present in region Y; each Y and Y′ is independently of length sufficient to stably interact (i.e., base pair) with a first and a second HCV target nucleic acid sequence, respectively, or a portion thereof; W represents a nucleotide or non-nucleotide linker that connects sequences Y′ and Y; and the multifunctional siNA directs cleavage of the first and second HCV target sequence via RNA interference. In one embodiment, the first HCV target nucleic acid sequence and the second HCV target nucleic acid sequence are present in the same target nucleic acid molecule (e.g., HCV RNA or host RNA). In another embodiment, the first HCV target nucleic acid sequence and the second HCV target nucleic acid sequence are present in different target nucleic acid molecules (e.g., HCV RNA and host RNA). In one embodiment, region W connects the 3′-end of sequence Y′ with the 3′-end of sequence Y. In one embodiment, region W connects the 3′-end of sequence Y′ with the 5′-end of sequence Y. In one embodiment, region W connects the 5′-end of sequence Y′ with the 5′-end of sequence Y. In one embodiment, region W connects the 5′-end of sequence Y′ with the 3′-end of sequence Y. In one embodiment, a terminal phosphate group is present at the 5′-end of sequence X. In one embodiment, a terminal phosphate group is present at the 5′-end of sequence X′. In one embodiment, a terminal phosphate group is present at the 5′-end of sequence Y. In one embodiment, a terminal phosphate group is present at the 5′-end of sequence Y′. In one embodiment, W connects sequences Y and Y′ via a biodegradable linker. In one embodiment, W further comprises a conjugate, lable, aptamer, ligand, lipid, or polymer.

[0352] In one embodiment, a multifunctional siNA molecule of the invention comprises a structure having Formula MF-V:

X X′
Y′-W-Y

wherein each X, X′, Y, and Y′ is independently an oligonucleotide of length about 15 nucleotides to about 50 nucleotides, preferably about 18 to about 40 nucleotides, or about 19 to about 23 nucleotides; X comprises nucleotide sequence that is complementary to nucleotide sequence present in region Y′; X′ comprises nucleotide sequence that is complementary to nucleotide sequence present in region Y; each X, X′, Y, or Y′ is independently of length sufficient to stably interact (i.e., base pair) with a first, second, third, or fourth HCV target nucleic acid sequence, respectively, or a portion thereof; W represents a nucleotide or non-nucleotide linker that connects sequences Y′ and Y; and the multifunctional siNA directs cleavage of the first, second, third, and/or fourth target sequence via RNA interference. In one embodiment, the first, second, third and fourth HCV target nucleic acid sequence are all present in the same target nucleic acid molecule (e.g., HCV RNA or host RNA). In another embodiment, the first, second, third and fourth HCV target nucleic acid sequence are independently present in different target nucleic acid molecules (e.g., HCV RNA and host RNA). In one embodiment, region W connects the 3′-end of sequence Y′ with the 3′-end of sequence Y. In one embodiment, region W connects the 3′-end of sequence Y′ with the 5′-end of sequence Y. In one embodiment, region W connects the 5′-end of sequence Y′ with the 5′-end of sequence Y. In one embodiment, region W connects the 5′-end of sequence Y′ with the 3′-end of sequence Y. In one embodiment, a terminal phosphate group is present at the 5′-end of sequence X. In one embodiment, a terminal phosphate group is present at the 5′-end of sequence X′. In one embodiment, a terminal phosphate group is present at the 5′-end of sequence Y. In one embodiment, a terminal phosphate group is present at the 5′-end of sequence Y′. In one embodiment, W connects sequences Y and Y′ via a biodegradable linker. In one embodiment, W further comprises a conjugate, lable, aptamer, ligand, lipid, or polymer.

[0353] In one embodiment, regions X and Y of multifunctional siNA molecule of the invention (e.g., having any of Formula MF-1-MF-V), are complementary to different target nucleic acid sequences that are portions of the same target nucleic acid molecule. In one embodiment, such target nucleic acid sequences are at different locations within the coding region of a RNA transcript. In one embodiment, such target nucleic acid sequences comprise coding and non-coding regions of the same RNA transcript. In one embodiment, such target nucleic acid sequences comprise regions of alternately spliced transcripts or precursors of such alternately spliced transcripts.

[0354] In one embodiment, a multifunctional siNA molecule having any of Formula MF-I-MF-V can comprise chemical modifications as described herein without limitation, such as, for example, nucleotides having any of Formulae I-VII described herein, stabilization chemistries as described in Table IV, or any other combination of modified nucleotides and non-nucleotides as described in the various embodiments herein.

[0355] In one embodiment, the palidrome or repeat sequence or modified nucleotide (e.g., nucleotide with a modified base, such as 2-amino purine or a universal base) in Z of multifunctional siNA constructs having Formula MF-I or MF-II comprises chemically modified nucleotides that are able to interact with a portion of the target nucleic acid sequence (e.g., modified base analogs that can form Watson Crick base pairs or non-Watson Crick base pairs).

[0356] In one embodiment, a multifunctional siNA molecule of the invention, for example each strand of a multifunctional siNA having MF-I-MF-V, independently comprises about 15 to about 40 nucleotides (e.g., about 15, 16, 17, 18, 19, 20, 21, 22, 23, 24, 25, 26, 27, 28, 29, 30, 31, 32, 33, 34, 35, 36, 37, 38, 39, or 40 nucleotides). In one embodiment, a multifunctional siNA molecule of the invention comprises one or more chemical modifications. In a non-limiting example, the introduction of chemically modified nucleotides and/or non-nucleotides into nucleic acid molecules of the invention provides a powerful tool in overcoming potential limitations of in vivo stability and bioavailability inherent to unmodified RNA molecules that are delivered exogenously. For example, the use of chemically modified nucleic acid molecules can enable a lower dose of a particular nucleic acid molecule for a given therapeutic effect since chemically modified nucleic acid molecules tend to have a longer half-life in serum or in cells or tissues. Furthermore, certain chemical modifications can improve the bioavailability and/or potency of nucleic acid molecules by not only enhancing half-life but also facilitating the targeting of nucleic acid molecules to particular organs, cells or tissues and/or improving cellular uptake of the nucleic acid molecules. Therefore, even if the activity of a chemically modified nucleic acid molecule is reduced in vitro as compared to a native/unmodified nucleic acid molecule, for example when compared to an unmodified RNA molecule, the overall activity of the modified nucleic acid molecule can be greater than the native or unmodified nucleic acid molecule due to improved stability, potency, duration of effect, bioavailability and/or delivery of the molecule.

[0357] In another embodiment, the invention features multifunctional siNAs, wherein the multifunctional siNAs are assembled from two separate double-stranded siNAs, with one of the ends of each sense strand is tethered to the end of the sense strand of the other siNA molecule, such that the two antisense siNA strands are annealed to their corresponding sense strand that are tethered to each other at one end (see FIG. 42). The tethers or linkers can be nucleotide-based linkers or non-nucleotide based linkers as generally known in the art and as described herein.

[0358] In one embodiment, the invention features a multifunctional siNA, wherein the multifunctional siNA is assembled from two separate double-stranded siNAs, with the 5′-end of one sense strand of the siNA is tethered to the 5′-end of the sense strand of the other siNA molecule, such that the 5′-ends of the two antisense siNA strands, annealed to their corresponding sense strand that are tethered to each other at one end, point away (in the opposite direction) from each other (see FIG. 42(A)). The tethers or linkers can be nucleotide-based linkers or non-nucleotide based linkers as generally known in the art and as described herein.

[0359] In one embodiment, the invention features a multifunctional siNA, wherein the multifunctional siNA is assembled from two separate double-stranded siNAs, with the 3′-end of one sense strand of the siNA is tethered to the 3′-end of the sense strand of the other siNA molecule, such that the 5′-ends of the two antisense siNA strands, annealed to their corresponding sense strand that are tethered to each other at one end, face each other (see FIG. 42(B)). The tethers or linkers can be nucleotide-based linkers or non-nucleotide based linkers as generally known in the art and as described herein.

[0360] In one embodiment, the invention features a multifunctional siNA, wherein the multifunctional siNA is assembled from two separate double-stranded siNAs, with the 5′-end of one sense strand of the siNA is tethered to the 3′-end of the sense strand of the other siNA molecule, such that the 5′-end of the one of the antisense siNA strands annealed to their corresponding sense strand that are tethered to each other at one end, faces the 3′-end of the other antisense strand (see FIG. 42 (C-D)). The tethers or linkers can be nucleotide-based linkers or non-nucleotide based linkers as generally known in the art and as described herein.

[0361] In one embodiment, the invention features a multifunctional siNA, wherein the multifunctional siNA is assembled from two separate double-stranded siNAs, with the 5′-end of one antisense strand of the siNA is tethered to the 3′-end of the antisense strand of the other siNA molecule, such that the 5′-end of the one of the sense siNA strands annealed to their corresponding antisense sense strand that are tethered to each other at one end, faces the 3′-end of the other sense strand (see FIG. 42 (G-H)). In one embodiment, the linkage between the 5′-end of the first antisense strand and the 3′-end of the second antisense strand is designed in such a way as to be readily cleavable (e.g., biodegradable linker) such that the 5′end of each antisense strand of the multifunctional siNA has a free 5′-end suitable to mediate RNA interefence-based cleavage of the target RNA. The tethers or linkers can be nucleotide-based linkers or non-nucleotide based linkers as generally known in the art and as described herein.

[0362] In one embodiment, the invention features a multifunctional siNA, wherein the multifunctional siNA is assembled from two separate double-stranded siNAs, with the 5′-end of one antisense strand of the siNA is tethered to the 5′-end of the antisense strand of the other siNA molecule, such that the 3′-end of the one of the sense siNA strands annealed to their corresponding antisense sense strand that are tethered to each other at one end, faces the 3′-end of the other sense strand (see FIG. 42(E)). In one embodiment, the linkage between the 5′-end of the first antisense strand and the 5′-end of the second antisense strand is designed in such a way as to be readily cleavable (e.g., biodegradable linker) such that the 5′end of each antisense strand of the multifunctional siNA has a free 5′-end suitable to mediate RNA interefence-based cleavage of the target RNA. The tethers or linkers can be nucleotide-based linkers or non-nucleotide based linkers as generally known in the art and as described herein.

[0363] In one embodiment, the invention features a multifunctional siNA, wherein the multifunctional siNA is assembled from two separate double-stranded siNAs, with the 3′-end of one antisense strand of the siNA is tethered to the 3′-end of the antisense strand of the other siNA molecule, such that the 5′-end of the one of the sense siNA strands annealed to their corresponding antisense sense strand that are tethered to each other at one end, faces the 3′-end of the other sense strand (see FIG. 42(F)). In one embodiment, the linkage between the 5′-end of the first antisense strand and the 5′-end of the second antisense strand is designed in such a way as to be readily cleavable (e.g., biodegradable linker) such that the 5′end of each antisense strand of the multifunctional siNA has a free 5′-end suitable to mediate RNA interefence-based cleavage of the target RNA. The tethers or linkers can be nucleotide-based linkers or non-nucleotide based linkers as generally known in the art and as described herein.

[0364] In any of the above embodiments, a first target nucleic acid sequence or second target nucleic acid sequence can independently comprise HCV RNA or a portion thereof or a polynucleotide coding or non-coding sequence of cellular or host target that is invoved in HCV infection or replication, or disease processes associated with HCV infection such as such as cellular receptors, cell surface molecules, cellular enzymes, cellular transcription factors, and/or cytokines, second messengers, and cellular accessory molecules including, but not limited to, La antigen (see for example Costa-Mattioli et al., 2004, Mol Cell Biol., 24, 6861-70, e.g., Genbank Accession No. NM_{—}003142); FAS (e.g., Genbank Accession No. NM_{—}000043) or FAS ligand (e.g., Genbank Accession No. NM_{—}000639); interferon regulatory factors (IRFs; e.g., Genbank Accession No. AF082503.1); cellular PKR protein kinase (e.g., Genbank Accession No. XM_{—}002661.7); human eukaryotic initiation factors 2B (elF2Bgamma; e.g., Genbank Accession No. AF256223, and/or eIF2gamma; e.g., Genbank Accession No. NM_{—}006874.1); human DEAD Box protein (DDX3; e.g., Genbank Accession No. XM_{—}018021.2); and cellular proteins that bind to the poly(U) tract of the HCV 3′-UTR, such as polypyrimidine tract-binding protein (e.g., Genbank Accession Nos. NM_{—}031991.1 and XM_{—}042972.3). In one embodiment, the first HCV target nucleic acid sequence is a HCV RNA or a portion thereof and the second HCV target nucleic acid sequence is a HCV RNA of a portion thereof. In one embodiment, the first HCV target nucleic acid sequence is a HCV RNA or a portion thereof and the second HCV target nucleic acid sequence is a host RNA or a portion thereof. In one embodiment, the first HCV target nucleic acid sequence is a host RNA or a portion thereof and the second HCV target nucleic acid sequence is a host RNA or a portion thereof. In one embodiment, the first HCV target nucleic acid sequence is a host RNA or a portion thereof and the second HCV target nucleic acid sequence is a HCV RNA or a portion thereof.

Synthesis of Nucleic Acid Molecules

[0365] Synthesis of nucleic acids greater than 100 nucleotides in length is difficult using automated methods, and the therapeutic cost of such molecules is prohibitive. In this invention, small nucleic acid motifs (“small” refers to nucleic acid motifs no more than 100 nucleotides in length, preferably no more than 80 nucleotides in length, and most preferably no more than 50 nucleotides in length; e.g., individual siNA oligonucleotide sequences or siNA sequences synthesized in tandem) are preferably used for exogenous delivery. The simple structure of these molecules increases the ability of the nucleic acid to invade targeted regions of protein and/or RNA structure. Exemplary molecules of the instant invention are chemically synthesized, and others can similarly be synthesized.

[0366] Oligonucleotides (e.g., certain modified oligonucleotides or portions of oligonucleotides lacking ribonucleotides) are synthesized using protocols known in the art, for example as described in Caruthers et al., 1992, Methods in Enzymology 211, 3-19, Thompson et al., International PCT Publication No. WO 99/54459, Wincott et al., 1995, Nucleic Acids Res. 23, 2677-2684, Wincott et al., 1997, Methods Mol. Bio., 74, 59, Brennan et al., 1998, Biotechnol Bioeng., 61, 33-45, and Brennan, U.S. Pat. No. 6,001,311. All of these references are incorporated herein by reference. The synthesis of oligonucleotides makes use of common nucleic acid protecting and coupling groups, such as dimethoxytrityl at the 5′-end, and phosphoramidites at the 3′-end. In a non-limiting example, small scale syntheses are conducted on a 394 Applied Biosystems, Inc. synthesizer using a 0.2 mmol scale protocol with a 2.5 min coupling step for 2′-O-methylated nucleotides and a 45 second coupling step for 2′-deoxy nucleotides or 2′-deoxy-2′-fluoro nucleotides. Table V outlines the amounts and the contact times of the reagents used in the synthesis cycle. Alternatively, syntheses at the 0.2 μmol scale can be performed on a 96-well plate synthesizer, such as the instrument produced by Protogene (Palo Alto, Calif.) with minimal modification to the cycle. A 33-fold excess (60 μL of 0.11 M=6.6 μmol) of 2′-O-methyl phosphoramidite and a 105-fold excess of S-ethyl tetrazole (60 μL of 0.25 M=15 μmol) can be used in each coupling cycle of 2′-O-methyl residues relative to polymer-bound 5′-hydroxyl. A 22-fold excess (40 μL of 0.11 M=4.4 μmol) of deoxy phosphoramidite and a 70-fold excess of S-ethyl tetrazole (40 μL of 0.25 M=10 μmol) can be used in each coupling cycle of deoxy residues relative to polymer-bound 5′-hydroxyl. Average coupling yields on the 394 Applied Biosystems, Inc. synthesizer, determined by calorimetric quantitation of the trityl fractions, are typically 97.5-99%. Other oligonucleotide synthesis reagents for the 394 Applied Biosystems, Inc. synthesizer include the following: detritylation solution is 3% TCA in methylene chloride (ABI); capping is performed with 16% N-methyl imidazole in THF (ABI) and 10% acetic anhydride/10% 2,6-lutidine in THF (ABI); and oxidation solution is 16.9 mM 12, 49 mM pyridine, 9% water in THF (PerSeptive Biosystems, Inc.). Burdick & Jackson Synthesis Grade acetonitrile is used directly from the reagent bottle. S-Ethyltetrazole solution (0.25 M in acetonitrile) is made up from the solid obtained from American International Chemical, Inc. Alternately, for the introduction of phosphorothioate linkages, Beaucage reagent (3H-1,2-Benzodithiol-3-one 1,1-diokide, 0.05 M in acetonitrile) is used.

[0367] Deprotection of the DNA-based oligonucleotides is performed as follows: the polymer-bound trityl-on oligoribonucleotide is transferred to a 4 mL glass screw top vial and suspended in a solution of 40% aqueous methylamine (1 mL) at 65° C. for 10 minutes. After cooling to −20° C., the supernatant is removed from the polymer support. The support is washed three times with 1.0 mL of EtOH:MeCN:H₂O/3:1:1, vortexed and the supernatant is then added to the first supernatant. The combined supernatants, containing the oligoribonucleotide, are dried to a white powder.

[0368] The method of synthesis used for RNA including certain siNA molecules of the invention follows the procedure as described in Usman et al., 1987, J. Am. Chem. Soc., 109, 7845; Scaringe et al., 1990, Nucleic Acids Res., 18, 5433; and Wincott et al., 1995, Nucleic Acids Res. 23, 2677-2684 Wincott et al., 1997, Methods Mol. Bio., 74, 59, and makes use of common nucleic acid protecting and coupling groups, such as dimethoxytrityl at the 5′-end, and phosphoramidites at the 3′-end. In a non-limiting example, small scale syntheses are conducted on a 394 Applied Biosystems, Inc. synthesizer using a 0.2 μmol scale protocol with a 7.5 min coupling step for alkylsilyl protected nucleotides and a 2.5 min coupling step for 2′-O-methylated nucleotides. Table V outlines the amounts and the contact times of the reagents used in the synthesis cycle. Alternatively, syntheses at the 0.2 μmol scale can be done on a 96-well plate synthesizer, such as the instrument produced by Protogene (Palo Alto, Calif.) with minimal modification to the cycle. A 33-fold excess (60 μL of 0.11 M=6.6 μmol) of 2′-O-methyl phosphoramidite and a 75-fold excess of S-ethyl tetrazole (60 μL of 0.25 M=15 μmol) can be used in each coupling cycle of 2′-O-methyl residues relative to polymer-bound 5′-hydroxyl. A 66-fold excess (120 μL of 0.11 M=13.2 μmol) of alkylsilyl (ribo) protected phosphoramidite and a 150-fold excess of S-ethyl tetrazole (120 μL of 0.25 M=30 μmol) can be used in each coupling cycle of ribo residues relative to polymer-bound 5′-hydroxyl. Average coupling yields on the 394 Applied Biosystems, Inc. synthesizer, determined by colorimetric quantitation of the trityl fractions, are typically 97.5-99%. Other oligonucleotide synthesis reagents for the 394 Applied Biosystems, Inc. synthesizer include the following: detritylation solution is 3% TCA in methylene chloride (ABI); capping is performed with 16% N-methyl imidazole in THF (ABI) and 10% acetic anhydride/10% 2,6-lutidine in THF (ABI); oxidation solution is 16.9 mM I₂, 49 mM pyridine, 9% water in THF (PerSeptive Biosystems, Inc.). Burdick & Jackson Synthesis Grade acetonitrile is used directly from the reagent bottle. S-Ethyltetrazole solution (0.25 M in acetonitrile) is made up from the solid obtained from American International Chemical, Inc. Alternately, for the introduction of phosphorothioate linkages, Beaucage reagent (3H-1,2-Benzodithiol-3-one 1,1-dioxide 0.05 M in acetonitrile) is used.

[0369] Deprotection of the RNA is performed using either a two-pot or one-pot protocol. For the two-pot protocol, the polymer-bound trityl-on oligoribonucleotide is transferred to a 4 mL glass screw top vial and suspended in a solution of 40% aq. methylamine (1 mL) at 65° C. for 10 min. After cooling to −20° C., the supernatant is removed from the polymer support. The support is washed three times with 1.0 mL of EtOH:MeCN:H₂O/3:1:1, vortexed and the supernatant is then added to the first supernatant. The combined supernatants, containing the oligoribonucleotide, are dried to a white powder. The base deprotected oligoribonucleotide is resuspended in anhydrous TEA/HF/NMP solution (300 μL of a solution of 1.5 mL N-methylpyrrolidinone, 750 μL TEA and 1 mL TEA-3HF to provide a 1.4 M HF concentration) and heated to 65° C. After 1.5 h, the oligomer is quenched with 1.5 M NH₄HCO₃.

[0370] Alternatively, for the one-pot protocol, the polymer-bound trityl-on oligoribonucleotide is transferred to a 4 mL glass screw top vial and suspended in a solution of 33% ethanolic methylamine/DMSO: 1/1 (0.8 mL) at 65° C. for 15 minutes. The vial is brought to room temperature TEA-3HF (0.1 mL) is added and the vial is heated at 65° C. for 15 minutes. The sample is cooled at −20° C. and then quenched with 1.5 M NH₄HCO₃.

[0371] For purification of the trityl-on oligomers, the quenched NH₄HCO₃ solution is loaded onto a C-18 containing cartridge that had been prewashed with acetonitrile followed by 50 mM TEAA. After washing the loaded cartridge with water, the RNA is detritylated with 0.5% TFA for 13 minutes. The cartridge is then washed again with water, salt exchanged with 1 M NaCl and washed with water again. The oligonucleotide is then eluted with 30% acetonitrile.

[0372] The average stepwise coupling yields are typically >98% (Wincott et al., 1995 Nucleic Acids Res. 23, 2677-2684). Those of ordinary skill in the art will recognize that the scale of synthesis can be adapted to be larger or smaller than the example described above including but not limited to 96-well format.

[0373] Alternatively, the nucleic acid molecules of the present invention can be synthesized separately and joined together post-synthetically, for example, by ligation (Moore et al., 1992, Science 256, 9923; Draper et al., International PCT publication No. WO 93/23569; Shabarova et al., 1991, Nucleic Acids Research 19, 4247; Bellon et al., 1997, Nucleosides & Nucleotides, 16, 951; Bellon et al., 1997, Bioconjugate Chem. 8, 204), or by hybridization following synthesis and/or deprotection.

[0374] The siNA molecules of the invention can also be synthesized via a tandem synthesis methodology as described in Example 1 herein, wherein both siNA strands are synthesized as a single contiguous oligonucleotide fragment or strand separated by a cleavable linker which is subsequently cleaved to provide separate siNA fragments or strands that hybridize and permit purification of the siNA duplex. The linker can be a polynucleotide linker or a non-nucleotide linker. The tandem synthesis of siNA as described herein can be readily adapted to both multiwell/multiplate synthesis platforms such as 96 well or similarly larger multi-well platforms. The tandem synthesis of siNA as described herein can also be readily adapted to large scale synthesis platforms employing batch reactors, synthesis columns and the like.

[0375] A siNA molecule can also be assembled from two distinct nucleic acid strands or fragments wherein one fragment includes the sense region and the second fragment includes the antisense region of the RNA molecule.

[0376] The nucleic acid molecules of the present invention can be modified extensively to enhance stability by modification with nuclease resistant groups, for example, 2′-amino, 2′-C-allyl, 2′-fluoro, 2′-O-methyl, 2′-H (for a review see Usman and Cedergren, 1992, TIBS 17, 34; Usman et al., 1994, Nucleic Acids Symp. Ser. 31, 163). siNA constructs can be purified by gel electrophoresis using general methods or can be purified by high pressure liquid chromatography (HPLC; see Wincott et al., supra, the totality of which is hereby incorporated herein by reference) and re-suspended in water.

[0377] In another aspect of the invention, siNA molecules of the invention are expressed from transcription units inserted into DNA or RNA vectors. The recombinant vectors can be DNA plasmids or viral vectors. siNA expressing viral vectors can be constructed based on, but not limited to, adeno-associated virus, retrovirus, adenovirus, or alphavirus. The recombinant vectors capable of expressing the siNA molecules can be delivered as described herein, and persist in target cells. Alternatively, viral vectors can be used that provide for transient expression of siNA molecules.

Optimizing Activity of the Nucleic Acid Molecule of the Invention.

[0378] Chemically synthesizing nucleic acid molecules with modifications (base, sugar and/or phosphate) can prevent their degradation by serum ribonucleases, which can increase their potency (see e.g., Eckstein et al., International Publication No. WO 92/07065; Perrault et al., 1990 Nature 344, 565; Pieken et al., 1991, Science 253, 314; Usman and Cedergren, 1992, Trends in Biochem. Sci. 17, 334; Usman et al., International Publication No. WO 93/15187; and Rossi et al., International Publication No. WO 91/03162; Sproat, U.S. Pat. No. 5,334,711; Gold et al., U.S. Pat. No. 6,300,074; and Burgin et al., supra; all of which are incorporated by reference herein). All of the above references describe various chemical modifications that can be made to the base, phosphate and/or sugar moieties of the nucleic acid molecules described herein. Modifications that enhance their efficacy in cells, and removal of bases from nucleic acid molecules to shorten oligonucleotide synthesis times and reduce chemical requirements are desired.

[0379] There are several examples in the art describing sugar, base and phosphate modifications that can be introduced into nucleic acid molecules with significant enhancement in their nuclease stability and efficacy. For example, oligonucleotides are modified to enhance stability and/or enhance biological activity by modification with nuclease resistant groups, for example, 2′-amino, 2′-C-allyl, 2′-fluoro, 2′-O-methyl, 2′-O-allyl, 2′-H, nucleotide base modifications (for a review see Usman and Cedergren, 1992, TIBS. 17, 34; Usman et al., 1994, Nucleic Acids Symp. Ser. 31, 163; Burgin et al., 1996, Biochemistry, 35, 14090). Sugar modification of nucleic acid molecules have been extensively described in the art (see Eckstein et al., International Publication PCT No. WO 92/07065; Perrault et al. Nature, 1990, 344, 565-568; Pieken et al. Science, 1991, 253, 314-317; Usman and Cedergren, Trends in Biochem. Sci., 1992, 17, 334-339; Usman et al. International Publication PCT No. WO 93/15187; Sproat, U.S. Pat. No. 5,334,711 and Beigelman et al., 1995, J. Biol. Chem., 270, 25702; Beigelman et al., International PCT publication No. WO 97/26270; Beigelman et al., U.S. Pat. No. 5,716,824; Usman et al., U.S. Pat. No. 5,627,053; Woolf et al., International PCT Publication No. WO 98/13526; Thompson et al., U.S. Ser. No. 60/082,404 which was filed on Apr. 20, 1998; Karpeisky et al., 1998, Tetrahedron Lett., 39, 1131; Earnshaw and Gait, 1998, Biopolymers (Nucleic Acid Sciences), 48, 39-55; Verma and Eckstein, 1998, Annu. Rev. Biochem., 67, 99-134; and Burlina et al., 1997, Bioorg. Med. Chem., 5, 1999-2010; all of the references are hereby incorporated in their totality by reference herein). Such publications describe general methods and strategies to determine the location of incorporation of sugar, base and/or phosphate modifications and the like into nucleic acid molecules without modulating catalysis, and are incorporated by reference herein. In view of such teachings, similar modifications can be used as described herein to modify the siNA nucleic acid molecules of the instant invention so long as the ability of siNA to promote RNAi is cells is not significantly inhibited.

[0380] While chemical modification of oligonucleotide internucleotide linkages with phosphorothioate, phosphorodithioate, and/or 5′-methylphosphonate linkages improves stability, excessive modifications can cause some toxicity or decreased activity. Therefore, when designing nucleic acid molecules, the amount of these internucleotide linkages should be minimized. The reduction in the concentration of these linkages should lower toxicity, resulting in increased efficacy and higher specificity of these molecules.

[0381] Short interfering nucleic acid (siNA) molecules having chemical modifications that maintain or enhance activity are provided. Such a nucleic acid is also generally more resistant to nucleases than an unmodified nucleic acid. Accordingly, the in vitro and/or in vivo activity should not be significantly lowered. In cases in which modulation is the goal, therapeutic nucleic acid molecules delivered exogenously should optimally be stable within cells until translation of the target RNA has been modulated long enough to reduce the levels of the undesirable protein. This period of time varies between hours to days depending upon the disease state. Improvements in the chemical synthesis of RNA and DNA (Wincott et al., 1995, Nucleic Acids Res. 23, 2677; Caruthers et al., 1992, Methods in Enzymology 211, 3-19 (incorporated by reference herein)) have expanded the ability to modify nucleic acid molecules by introducing nucleotide modifications to enhance their nuclease stability, as described above.

[0382] In one embodiment, nucleic acid molecules of the invention include one or more (e.g., about 1, 2, 3, 4, 5, 6, 7, 8, 9, 10, or more) G-clamp nucleotides. A G-clamp nucleotide is a modified cytosine analog wherein the modifications confer the ability to hydrogen bond both Watson-Crick and Hoogsteen faces of a complementary guanine within a duplex, see for example Lin and Matteucci, 1998, J. Am. Chem. Soc., 120, 8531-8532. A single G-clamp analog substitution within an oligonucleotide can result in substantially enhanced helical thermal stability and mismatch discrimination when hybridized to complementary oligonucleotides. The inclusion of such nucleotides in nucleic acid molecules of the invention results in both enhanced affinity and specificity to nucleic acid targets, complementary sequences, or template strands. In another embodiment, nucleic acid molecules of the invention include one or more (e.g., about 1, 2, 3, 4, 5, 6, 7, 8, 9, 10, or more) LNA “locked nucleic acid” nucleotides such as a 2′,4′-C methylene bicyclo nucleotide (see for example Wengel et al., International PCT Publication No. WO 00/66604 and WO 99/14226).

[0383] In another embodiment, the invention features conjugates and/or complexes of siNA molecules of the invention. Such conjugates and/or complexes can be used to facilitate delivery of siNA molecules into a biological system, such as a cell. The conjugates and complexes provided by the instant invention can impart therapeutic activity by transferring therapeutic compounds across cellular membranes, altering the pharmacokinetics, and/or modulating the localization of nucleic acid molecules of the invention. The present invention encompasses the design and synthesis of novel conjugates and complexes for the delivery of molecules, including, but not limited to, small molecules, lipids, cholesterol, phospholipids, nucleosides, nucleotides, nucleic acids, antibodies, toxins, negatively charged polymers and other polymers, for example proteins, peptides, hormones, carbohydrates, polyethylene glycols, or polyamines, across cellular membranes. In general, the transporters described are designed to be used either individually or as part of a multi-component system, with or without degradable linkers. These compounds are expected to improve delivery and/or localization of nucleic acid molecules of the invention into a number of cell types originating from different tissues, in the presence or absence of serum (see Sullenger and Cech, U.S. Pat. No. 5,854,038). Conjugates of the molecules described herein can be attached to biologically active molecules via linkers that are biodegradable, such as biodegradable nucleic acid linker molecules.

[0384] The term “biodegradable linker” as used herein, refers to a nucleic acid or non-nucleic acid linker molecule that is designed as a biodegradable linker to connect one molecule to another molecule, for example, a biologically active molecule to a siNA molecule of the invention or the sense and antisense strands of a siNA molecule of the invention. The biodegradable linker is designed such that its stability can be modulated for a particular purpose, such as delivery to a particular tissue or cell type. The stability of a nucleic acid-based biodegradable linker molecule can be modulated by using various chemistries, for example combinations of ribonucleotides, deoxyribonucleotides, and chemically-modified nucleotides, such as 2′-O-methyl, 2′-fluoro, 2′-amino, 2′-O-amino, 2′-C-allyl, 2′-O-allyl, and other 2′-modified or base modified nucleotides. The biodegradable nucleic acid linker molecule can be a dimer, trimer, tetramer or longer nucleic acid molecule, for example, an oligonucleotide of about 2, 3, 4, 5, 6, 7, 8, 9, 10, 11, 12, 13, 14, 15, 16, 17, 18, 19, or 20 nucleotides in length, or can comprise a single nucleotide with a phosphorus-based linkage, for example, a phosphoramidate or phosphodiester linkage. The biodegradable nucleic acid linker molecule can also comprise nucleic acid backbone, nucleic acid sugar, or nucleic acid base modifications.

[0385] The term “biodegradable” as used herein, refers to degradation in a biological system, for example, enzymatic degradation or chemical degradation.

[0386] The term “biologically active molecule” as used herein refers to compounds or molecules that are capable of eliciting or modifying a biological response in a system. Non-limiting examples of biologically active siNA molecules either alone or in combination with other molecules contemplated by the instant invention include therapeutically active molecules such as antibodies, cholesterol, hormones, antivirals, peptides, proteins, chemotherapeutics, small molecules, vitamins, co-factors, nucleosides, nucleotides, oligonucleotides, enzymatic nucleic acids, antisense nucleic acids, triplex forming oligonucleotides, 2,5-A chimeras, siNA, dsRNA, allozymes, aptamers, decoys and analogs thereof. Biologically active molecules of the invention also include molecules capable of modulating the pharmacokinetics and/or pharmacodynamics of other biologically active molecules, for example, lipids and polymers such as polyamines, polyamides, polyethylene glycol and other polyethers.

[0387] The term “phospholipid” as used herein, refers to a hydrophobic molecule comprising at least one phosphorus group. For example, a phospholipid can comprise a phosphorus-containing group and saturated or unsaturated alkyl group, optionally substituted with OH, COOH, oxo, amine, or substituted or unsubstituted aryl groups.

[0388] Therapeutic nucleic acid molecules (e.g., siNA molecules) delivered exogenously optimally are stable within cells until reverse transcription of the RNA has been modulated long enough to reduce the levels of the RNA transcript. The nucleic acid molecules are resistant to nucleases in order to function as effective intracellular therapeutic agents. Improvements in the chemical synthesis of nucleic acid molecules described in the instant invention and in the art have expanded the ability to modify nucleic acid molecules by introducing nucleotide modifications to enhance their nuclease stability as described above.

[0389] In yet another embodiment, siNA molecules having chemical modifications that maintain or enhance enzymatic activity of proteins involved in RNAi are provided. Such nucleic acids are also generally more resistant to nucleases than unmodified nucleic acids. Thus, in vitro and/or in vivo the activity should not be significantly lowered.

[0390] Use of the nucleic acid-based molecules of the invention will lead to better treatments by affording the possibility of combination therapies (e.g., multiple siNA molecules targeted to different genes; nucleic acid molecules coupled with known small molecule modulators; or intermittent treatment with combinations of molecules, including different motifs and/or other chemical or biological molecules). The treatment of subjects with siNA molecules can also include combinations of different types of nucleic acid molecules, such as enzymatic nucleic acid molecules (ribozymes), allozymes, antisense, 2,5-A oligoadenylate, decoys, and aptamers.

[0391] In another aspect a siNA molecule of the invention comprises one or more 5′ and/or a 3′-cap structure, for example, on only the sense siNA strand, the antisense siNA strand, or both siNA strands.

[0392] By “cap structure” is meant chemical modifications, which have been incorporated at either terminus of the oligonucleotide (see, for example, Adamic et al., U.S. Pat. No. 5,998,203, incorporated by reference herein). These terminal modifications protect the nucleic acid molecule from exonuclease degradation, and may help in delivery and/or localization within a cell. The cap may be present at the 5′-terminus (5′-cap) or at the 3′-terminal (3′-cap) or may be present on both termini. In non-limiting examples, the 5′-cap includes, but is not limited to, glyceryl, inverted deoxy abasic residue (moiety); 4′,5′-methylene nucleotide; 1-(beta-D-erythrofuranosyl) nucleotide, 4′-thio nucleotide; carbocyclic nucleotide; 1,5-anhydrohexitol nucleotide; L-nucleotides; alpha-nucleotides; modified base nucleotide; phosphorodithioate linkage; threo-pentofuranosyl nucleotide; acyclic 3′,4′-seco nucleotide; acyclic 3,4-dihydroxybutyl nucleotide; acyclic 3,5-dihydroxypentyl nucleotide, 3′-3′-inverted nucleotide moiety; 3′-3′-inverted abasic moiety; 3′-2′-inverted nucleotide moiety; 3′-2′-inverted abasic moiety; 1,4-butanediol phosphate; 3′-phosphoramidate; hexylphosphate; aminohexyl phosphate; 3′-phosphate; 3′-phosphorothioate; phosphorodithioate; or bridging or non-bridging methylphosphonate moiety. Non-limiting examples of cap moieties are shown in FIG. 10.

[0393] Non-limiting examples of the 3′-cap include, but are not limited to, glyceryl, inverted deoxy abasic residue (moiety), 4′,5′-methylene nucleotide; 1-(beta-D-erythrofuranosyl) nucleotide; 4′-thio nucleotide, carbocyclic nucleotide; 5′-amino-alkyl phosphate; 1,3-diamino-2-propyl phosphate; 3-aminopropyl phosphate; 6-aminohexyl phosphate; 1,2-aminododecyl phosphate; hydroxypropyl phosphate; 1,5-anhydrohexitol nucleotide; L-nucleotide; alpha-nucleotide; modified base nucleotide; phosphorodithioate; threo-pentofuranosyl nucleotide; acyclic 3′,4′-seco nucleotide; 3,4-dihydroxybutyl nucleotide; 3,5-dihydroxypentyl nucleotide, 5′-5′-inverted nucleotide moiety; 5′-5′-inverted abasic moiety; 5′-phosphoramidate; 5′-phosphorothioate; 1,4-butanediol phosphate; 5′-amino; bridging and/or non-bridging 5′-phosphoramidate, phosphorothioate and/or phosphorodithioate, bridging or non bridging methylphosphonate and 5′-mercapto moieties (for more details see Beaucage and Iyer, 1993, Tetrahedron 49, 1925; incorporated by reference herein).

[0394] By the term “non-nucleotide” is meant any group or compound which can be incorporated into a nucleic acid chain in the place of one or more nucleotide units, including either sugar and/or phosphate substitutions, and allows the remaining bases to exhibit their enzymatic activity. The group or compound is abasic in that it does not contain a commonly recognized nucleotide base, such as adenosine, guanine, cytosine, uracil or thymine and therefore lacks a base at the 1′-position.

[0395] An “alkyl” group refers to a saturated aliphatic hydrocarbon, including straight-chain, branched-chain, and cyclic alkyl groups. Preferably, the alkyl group has 1 to 12 carbons. More preferably, it is a lower alkyl of from 1 to 7 carbons, more preferably 1 to 4 carbons. The alkyl group can be substituted or unsubstituted. When substituted the substituted group(s) is preferably, hydroxyl, cyano, alkoxy, ═O, ═S, NO₂ or N(CH₃)₂, amino, or SH. The term also includes alkenyl groups that are unsaturated hydrocarbon groups containing at least one carbon-carbon double bond, including straight-chain, branched-chain, and cyclic groups. Preferably, the alkenyl group has 1 to 12 carbons. More preferably, it is a lower alkenyl of from 1 to 7 carbons, more preferably 1 to 4 carbons. The alkenyl group may be substituted or unsubstituted. When substituted the substituted group(s) is preferably, hydroxyl, cyano, alkoxy, ═O, ═S, NO₂, halogen, N(CH₃)₂, amino, or SH. The term “alkyl” also includes alkynyl groups that have an unsaturated hydrocarbon group containing at least one carbon-carbon triple bond, including straight-chain, branched-chain, and cyclic groups. Preferably, the alkynyl group has 1 to 12 carbons. More preferably, it is a lower alkynyl of from 1 to 7 carbons, more preferably 1 to 4 carbons. The alkynyl group may be substituted or unsubstituted. When substituted the substituted group(s) is preferably, hydroxyl, cyano, alkoxy, ═O, ═S, NO₂ or N(CH3)₂, amino or SH.

[0396] Such alkyl groups can also include aryl, alkylaryl, carbocyclic aryl, heterocyclic aryl, amide and ester groups. An “aryl” group refers to an aromatic group that has at least one ring having a conjugated pi electron system and includes carbocyclic aryl, heterocyclic aryl and biaryl groups, all of which may be optionally substituted. The preferred substituent(s) of aryl groups are halogen, trihalomethyl, hydroxyl, SH, OH, cyano, alkoxy, alkyl, alkenyl, alkynyl, and amino groups. An “alkylaryl” group refers to an alkyl group (as described above) covalently joined to an aryl group (as described above). Carbocyclic aryl groups are groups wherein the ring atoms on the aromatic ring are all carbon atoms. The carbon atoms are optionally substituted. Heterocyclic aryl groups are groups having from 1 to 3 heteroatoms as ring atoms in the aromatic ring and the remainder of the ring atoms are carbon atoms. Suitable heteroatoms include oxygen, sulfur, and nitrogen, and include furanyl, thienyl, pyridyl, pyrrolyl, N-lower alkyl pyrrolo, pyrimidyl, pyrazinyl, imidazolyl and the like, all optionally substituted. An “amide” refers to an —C(O)—NH—R, where R is either alkyl, aryl, alkylaryl or hydrogen. An “ester” refers to an —C(O)—OR′, where R is either alkyl, aryl, alkylaryl or hydrogen.

[0397] By “nucleotide” as used herein is as recognized in the art to include natural bases (standard), and modified bases well known in the art. Such bases are generally located at the 1′ position of a nucleotide sugar moiety. Nucleotides generally comprise a base, sugar and a phosphate group. The nucleotides can be unmodified or modified at the sugar, phosphate and/or base moiety, (also referred to interchangeably as nucleotide analogs, modified nucleotides, non-natural nucleotides, non-standard nucleotides and other; see, for example, Usman and McSwiggen, supra; Eckstein et al., International PCT Publication No. WO 92/07065; Usman et al., International PCT Publication No. WO 93/15187; Uhlman & Peyman, supra, all are hereby incorporated by reference herein). There are several examples of modified nucleic acid bases known in the art as summarized by Limbach et al., 1994, Nucleic Acids Res. 22, 2183. Some of the non-limiting examples of base modifications that can be introduced into nucleic acid molecules include, inosine, purine, pyridin4-one, pyridin-2-one, phenyl, pseudouracil, 2, 4, 6-trimethoxy benzene, 3-methyl uracil, dihydrouridine, naphthyl, aminophenyl, 5-alkylcytidines (e.g., 5-methylcytidine), 5-alkyluridines (e.g., ribothymidine), 5-halouridine (e.g., 5-bromouridine) or 6-azapyrimidines or 6-alkylpyrimidines (e.g. 6-methyluridine), propyne, and others (Burgin et al., 1996, Biochemistry, 35, 14090; Uhlman & Peyman, supra). By “modified bases” in this aspect is meant nucleotide bases other than adenine, guanine, cytosine and uracil at 1′ position or their equivalents.

[0398] In one embodiment, the invention features modified siNA molecules, with phosphate backbone modifications comprising one or more phosphorothioate, phosphorodithioate, methylphosphonate, phosphotriester, morpholino, amidate carbamate, carboxymethyl, acetamidate, polyamide, sulfonate, sulfonamide, sulfamate, formacetal, thioformacetal, and/or alkylsilyl, substitutions. For a review of oligonucleotide backbone modifications, see Hunziker and Leumann, 1995, Nucleic Acid Analogues: Synthesis and Properties, in Modern Synthetic Methods, VCH, 331417, and Mesmaeker et al., 1994, Novel Backbone Replacements for Oligonucleotides, in Carbohydrate Modifications in Antisense Research, ACS, 24-39.

[0399] By “abasic” is meant sugar moieties lacking a base or having other chemical groups in place of a base at the 1′ position, see for example Adamic et al., U.S. Pat. No. 5,998,203.

[0400] By “unmodified nucleoside” is meant one of the bases adenine, cytosine, guanine, thymine, or uracil joined to the 1′ carbon of β-D-ribo-furanose.

[0401] By “modified nucleoside” is meant any nucleotide base which contains a modification in the chemical structure of an unmodified nucleotide base, sugar and/or phosphate. Non-limiting examples of modified nucleotides are shown by Formulae I-VII and/or other modifications described herein.

[0402] In connection with 2′-modified nucleotides as described for the present invention, by “amino” is meant 2′-NH₂ or 2′-O—NH2, which can be modified or unmodified. Such modified groups are described, for example, in Eckstein et al., U.S. Pat. No. 5,672,695 and Matulic-Adamic et al., U.S. Pat. No. 6,248,878, which are both incorporated by reference in their entireties.

[0403] Various modifications to nucleic acid siNA structure can be made to enhance the utility of these molecules. Such modifications will enhance shelf-life, half-life in vitro, stability, and ease of introduction of such oligonucleotides to the target site, e.g., to enhance penetration of cellular membranes, and confer the ability to recognize and bind to targeted cells.

Administration of Nucleic Acid Molecules

[0404] A siNA molecule of the invention can be adapted for use to treat, prevent, inhibit, or reduce HCV infection, liver failure, hepatocellular carcinoma, cirrhosis and/or any other trait, disease or condition that is related to or will respond to the levels of HCV in a cell or tissue, alone or in combination with other therapies. In one embodiment, the siNA molecules of the invention and formulations or compositions thereof are administered to the liver as is generally known in the art (see for example Wen et al., 2004, World J Gastroenterol., 10, 244-9; Murao et al., 2002, Pharm Res., 19, 1808-14; Liu et al., 2003, Gene Ther., 10, 180-7; Hong et al., 2003, J Pharm Pharmacol., 54, 51-8; Herrmann et al., 2004, Arch Virol., 149, 1611-7; and Matsuno et al., 2003, Gene Ther., 10, 1559-66).

[0405] For example, a siNA molecule can comprise a delivery vehicle, including liposomes, for administration to a subject, carriers and diluents and their salts, and/or can be present in pharmaceutically acceptable formulations. Methods for the delivery of nucleic acid molecules are described in Akhtar et al., 1992, Trends Cell Bio., 2, 139; Delivery Strategies for Antisense Oligonucleotide Therapeutics, ed. Akhtar, 1995, Maurer et al., 1999, Mol. Membr. Biol., 16, 129-140; Hofland and Huang, 1999, Handb. Exp. Pharmacol., 137, 165-192; and Lee et al., 2000, ACS Symp. Ser., 752, 184-192, all of which are incorporated herein by reference. Beigelman et al., U.S. Pat. No. 6,395,713 and Sullivan et al., PCT WO 94/02595 further describe the general methods for delivery of nucleic acid molecules. These protocols can be utilized for the delivery of virtually any nucleic acid molecule. Nucleic acid molecules can be administered to cells by a variety of methods known to those of skill in the art, including, but not restricted to, encapsulation in liposomes, by iontophoresis, or by incorporation into other vehicles, such as biodegradable polymers, hydrogels, cyclodextrins (see for example Gonzalez et al., 1999, Bioconjugate Chem., 10, 1068-1074; Wang et al., International PCT publication Nos. WO 03/47518 and WO 03/46185), poly(lactic-co-glycolic)acid (PLGA) and PLCA microspheres (see for example U.S. Pat. No. 6,447,796 and US Patent Application Publication No. U.S. 2002130430), biodegradable nanocapsules, and bioadhesive microspheres, or by proteinaceous vectors (O'Hare and Normand, International PCT Publication No. WO 00/53722). In another embodiment, the nucleic acid molecules of the invention can also be formulated or complexed with polyethyleneimine and derivatives thereof, such as polyethyleneimine-polyethyleneglycol-N-acetylgalactosamine (PEI-PEG-GAL) or polyethyleneimine-polyethyleneglycol-tri-N-acetylgalactosamine (PEI-PEG-triGAL) derivatives. In one embodiment, the nucleic acid molecules of the invention are formulated as described in U.S. Patent Application Publication No. 20030077829, incorporated by reference herein in its entirety.

[0406] In one embodiment, a siNA molecule of the invention is complexed with membrane disruptive agents such as those described in U.S. Patent Application Publication No. 20010007666, incorporated by reference herein in its entirety including the drawings. In another embodiment, the membrane disruptive agent or agents and the siNA molecule are also complexed with a cationic lipid or helper lipid molecule, such as those lipids described in U.S. Pat. No. 6,235,310, incorporated by reference herein in its entirety including the drawings.

[0407] In one embodiment, a siNA molecule of the invention is complexed with delivery systems as described in U.S. Patent Application Publication No. 2003077829 and International PCT Publication Nos. WO 00/03683 and WO 02/087541, all incorporated by reference herein in their entirety including the drawings.

[0408] In one embodiment, the siNA molecules of the invention and formulations or compositions thereof are administered directly or topically (e.g., locally) to the dermis or follicles as is generally known in the art (see for example Brand, 2001, Curr. Opin. Mol. Ther., 3, 244-8; Regnier et al., 1998, J Drug Target, 5, 275-89; Kanikkannan, 2002, BioDrugs, 16, 33947; Wraight et al., 2001, Pharmacol. Ther., 90, 89-104; Preat and Dujardin, 2001, STP PharmaSciences, 11, 57-68; and Vogt et al., 2003, Hautarzt. 54, 692-8).

[0409] In one embodiment, delivery systems of the invention include, for example, aqueous and nonaqueous gels, creams, multiple emulsions, microemulsions, liposomes, ointments, aqueous and nonaqueous solutions, lotions, aerosols, hydrocarbon bases and powders, and can contain excipients such as solubilizers, permeation enhancers (e.g., fatty acids, fatty acid esters, fatty alcohols and amino acids), and hydrophilic polymers (e.g., polycarbophil and polyvinylpyrolidone). In one embodiment, the pharmaceutically acceptable carrier is a liposome or a transdermal enhancer. Examples of liposomes which can be used in this invention include the following: (1) CellFectin, 1:1.5 (M/M) liposome formulation of the cationic lipid N,NI,NII,NIII-tetramethyl-N,NI,NII,NIII-tetrapalmit-y-spermine and dioleoyl phosphatidylethanolamine (DOPE) (GIBCO BRL); (2) Cytofectin GSV, 2:1 (M/M) liposome formulation of a cationic lipid and DOPE (Glen Research); (3) DOTAP (N-[1-(2,3-dioleoyloxy)-N,N,N-tri-methyl-ammoniummethylsulfate) (Boehringer Manheim); and (4) Lipofectamine, 3:1 (M/M) liposome formulation of the polycationic lipid DOSPA and the neutral lipid DOPE (GIBCO BRL).

[0410] In one embodiment, delivery systems of the invention include patches, tablets, suppositories, pessaries, gels and creams, and can contain excipients such as solubilizers and enhancers (e.g., propylene glycol, bile salts and amino acids), and other vehicles (e.g., polyethylene glycol, fatty acid esters and derivatives, and hydrophilic polymers such as hydroxypropylmethylcellulose and hyaluronic acid).

[0411] In one embodiment, transdermal delivery systems of the invention include patches, tablets, suppositories, pessaries, gels and creams, and can contain excipients such as solubilizers and enhancers (e.g., propylene glycol, bile salts and amino acids), and other vehicles (e.g., polyethylene glycol, fatty acid esters and derivatives, and hydrophilic polymers such as hydroxypropylmethylcellulose and hyaluronic acid).

[0412] In one embodiment, siNA molecules of the invention are formulated or complexed with polyethylenimine (e.g., linear or branched PEI) and/or polyethylenimine derivatives, including for example grafted PEIs such as galactose PEI, cholesterol PEI, antibody derivatized PEI, and polyethylene glycol PEI (PEG-PEI) derivatives thereof (see for example Ogris et al., 2001, AAPA PhannSci, 3, 1-11; Furgeson et al., 2003, Bioconjugate Chem., 14, 840-847; Kunath et al., 2002, Phramaceutical Research, 19, 810-817; Choi et al., 2001, Bull. Korean Chem. Soc., 22, 46-52; Bettinger et al., 1999, Bioconjugate Chem., 10, 558-561; Peterson et al., 2002, Bioconjugate Chem., 13, 845-854; Erbacher et al., 1999, Journal of Gene Medicine Preprint, 1, 1-18; Godbey et al., 1999., PNAS USA, 96, 5177-5181; Godbey et al., 1999, Journal of Controlled Release, 60, 149-160; Diebold et al., 1999, Journal of Biological Chemistry, 274, 19087-19094; Thomas and Klibanov, 2002, PNAS USA, 99, 14640-14645; and Sagara, U.S. Pat. No. 6,586,524, incorporated by reference herein.

[0413] In one embodiment, a siNA molecule of the invention comprises a bioconjugate, for example a nucleic acid conjugate as described in Vargeese et al., U.S. Ser. No. 10/427,160, filed Apr. 30, 2003; U.S. Pat. No. 6,528,631; U.S. Pat. No. 6,335,434; U.S. Pat. No. 6,235,886; U.S. Pat. No. 6,153,737; U.S. Pat. No. 5,214,136; U.S. Pat. No. 5,138,045, all incorporated by reference herein.

[0414] Thus, the invention features a pharmaceutical composition comprising one or more nucleic acid(s) of the invention in an acceptable carrier, such as a stabilizer, buffer, and the like. The polynucleotides of the invention can be administered (e.g., RNA, DNA or protein) and introduced to a subject by any standard means, with or without stabilizers, buffers, and the like, to form a pharmaceutical composition. When it is desired to use a liposome delivery mechanism, standard protocols for formation of liposomes can be followed. The compositions of the present invention can also be formulated and used as creams, gels, sprays, oils and other suitable compositions for topical, dermal, or transdermal administration as is known in the art.

[0415] The present invention also includes pharmaceutically acceptable formulations of the compounds described. These formulations include salts of the above compounds, e.g., acid addition salts, for example, salts of hydrochloric, hydrobromic, acetic acid, and benzene sulfonic acid.

[0416] A pharmacological composition or formulation refers to a composition or formulation in a form suitable for administration, e.g., systemic or local administration, into a cell or subject, including for example a human. Suitable forms, in part, depend upon the use or the route of entry, for example oral, transdermal, or by injection. Such forms should not prevent the composition or formulation from reaching a target cell (i.e., a cell to which the negatively charged nucleic acid is desirable for delivery). For example, pharmacological compositions injected into the blood stream should be soluble. Other factors are known in the art, and include considerations such as toxicity and forms that prevent the composition or formulation from exerting its effect.

[0417] In one embodiment, siNA molecules of the invention are administered to a subject by systemic administration in a pharmaceutically acceptable composition or formulation. By “systemic administration” is meant in vivo systemic absorption or accumulation of drugs in the blood stream followed by distribution throughout the entire body. Administration routes that lead to systemic absorption include, without limitation: intravenous, subcutaneous, intraperitoneal, inhalation, oral, intrapulmonary and intramuscular. Each of these administration routes exposes the siNA molecules of the invention to an accessible diseased tissue. The rate of entry of a drug into the circulation has been shown to be a function of molecular weight or size. The use of a liposome or other drug carrier comprising the compounds of the instant invention can potentially localize the drug, for example, in certain tissue types, such as the tissues of the reticular endothelial system (RES). A liposome formulation that can facilitate the association of drug with the surface of cells, such as, lymphocytes and macrophages is also useful. This approach can provide enhanced delivery of the drug to target cells by taking advantage of the specificity of macrophage and lymphocyte immune recognition of abnormal cells.

[0418] By “pharmaceutically acceptable formulation” or “pharmaceutically acceptable composition” is meant, a composition or formulation that allows for the effective distribution of the nucleic acid molecules of the instant invention in the physical location most suitable for their desired activity. Non-limiting examples of agents suitable for formulation with the nucleic acid molecules of the instant invention include: P-glycoprotein inhibitors (such as Pluronic P85),; biodegradable polymers, such as poly (DL-lactide-coglycolide) microspheres for sustained release delivery (Emerich, DF et al, 1999, Cell Transplant, 8, 47-58); and loaded nanoparticles, such as those made of polybutylcyanoacrylate. Other non-limiting examples of delivery strategies for the nucleic acid molecules of the instant invention include material described in Boado et al., 1998, J. Pharm. Sci., 87, 1308-1315; Tyler et al., 1999, FEBS Lett., 421, 280-284; Pardridge et al., 1995, PNAS USA., 92, 5592-5596; Boado, 1995, Adv. Drug Delivery Rev., 15, 73-107; Aldrian-Herrada et al., 1998, Nucleic Acids Res., 26, 4910-4916; and Tyler et al., 1999, PNAS USA., 96, 7053-7058.

[0419] The invention also features the use of a composition comprising surface-modified liposomes containing poly (ethylene glycol) lipids (PEG-modified, or long-circulating liposomes or stealth liposomes) and nucleic acid molecules of the invention. These formulations offer a method for increasing the accumulation of drugs (e.g., siNA) in target tissues. This class of drug carriers resists opsonization and elimination by the mononuclear phagocytic system (MPS or RES), thereby enabling longer blood circulation times and enhanced tissue exposure for the encapsulated drug (Lasic et al. Chem. Rev. 1995, 95, 2601-2627; Ishiwata et al., Chem. Pharm. BulL 1995, 43, 1005-1011). Such liposomes have been shown to accumulate selectively in tumors, presumably by extravasation and capture in the neovascularized target tissues (Lasic et al., Science 1995, 267, 1275-1276; Oku et al., 1995, Biochim. Biophys. Acta, 1238, 86-90). The long-circulating liposomes enhance the pharmacokinetics and pharmacodynamics of DNA and RNA, particularly compared to conventional cationic liposomes which are known to accumulate in tissues of the MPS (Liu et al., J. Biol. Chem. 1995, 42, 24864-24870; Choi et al., International PCT Publication No. WO 96/10391; Ansell et al., International PCT Publication No. WO 96/10390; Holland et al., International PCT Publication No. WO 96/10392). Long-circulating liposomes are also likely to protect drugs from nuclease degradation to a greater extent compared to cationic liposomes, based on their ability to avoid accumulation in metabolically aggressive MPS tissues such as the liver and spleen.

[0420] The present invention also includes compositions prepared for storage or administration that include a pharmaceutically effective amount of the desired compounds in a pharmaceutically acceptable carrier or diluent. Acceptable carriers or diluents for therapeutic use are well known in the pharmaceutical art, and are described, for example, in Remington's Pharmaceutical Sciences, Mack Publishing Co. (A. R. Gennaro edit. 1985), hereby incorporated by reference herein. For example, preservatives, stabilizers, dyes and flavoring agents can be provided. These include sodium benzoate, sorbic acid and esters of p-hydroxybenzoic acid. In addition, antioxidants and suspending agents can be used.

[0421] A pharmaceutically effective dose is that dose required to prevent, inhibit the occurrence, or treat (alleviate a symptom to some extent, preferably all of the symptoms) of a disease state. The pharmaceutically effective dose depends on the type of disease, the composition used, the route of administration, the type of mammal being treated, the physical characteristics of the specific mammal under consideration, concurrent medication, and other factors that those skilled in the medical arts will recognize. Generally, an amount between 0.1 mg/kg and 100 mg/kg body weight/day of active ingredients is administered dependent upon potency of the negatively charged polymer.

[0422] The nucleic acid molecules of the invention and formulations thereof can be administered orally, topically, parenterally, by inhalation or spray, or rectally in dosage unit formulations containing conventional non-toxic pharmaceutically acceptable carriers, adjuvants and/or vehicles. The term parenteral as used herein includes percutaneous, subcutaneous, intravascular (e.g., intravenous), intramuscular, or intrathecal injection or infusion techniques and the like. In addition, there is provided a pharmaceutical formulation comprising a nucleic acid molecule of the invention and a pharmaceutically acceptable carrier. One or more nucleic acid molecules of the invention can be present in association with one or more non-toxic pharmaceutically acceptable carriers and/or diluents and/or adjuvants, and if desired other active ingredients. The pharmaceutical compositions containing nucleic acid molecules of the invention can be in a form suitable for oral use, for example, as tablets, troches, lozenges, aqueous or oily suspensions, dispersible powders or granules, emulsion, hard or soft capsules, or syrups or elixirs.

[0423] Compositions intended for oral use can be prepared according to any method known to the art for the manufacture of pharmaceutical compositions and such compositions can contain one or more such sweetening agents, flavoring agents, coloring agents or preservative agents in order to provide pharmaceutically elegant and palatable preparations. Tablets contain the active ingredient in admixture with non-toxic pharmaceutically acceptable excipients that are suitable for the manufacture of tablets. These excipients can be, for example, inert diluents; such as calcium carbonate, sodium carbonate, lactose, calcium phosphate or sodium phosphate; granulating and disintegrating agents, for example, corn starch, or alginic acid; binding agents, for example starch, gelatin or acacia; and lubricating agents, for example magnesium stearate, stearic acid or talc. The tablets can be uncoated or they can be coated by known techniques. In some cases such coatings can be prepared by known techniques to delay disintegration and absorption in the gastrointestinal tract and thereby provide a sustained action over a longer period. For example, a time delay material such as glyceryl monosterate or glyceryl distearate can be employed.

[0424] Formulations for oral use can also be presented as hard gelatin capsules wherein the active ingredient is mixed with an inert solid diluent, for example, calcium carbonate, calcium phosphate or kaolin, or as soft gelatin capsules wherein the active ingredient is mixed with water or an oil medium, for example peanut oil, liquid paraffin or olive oil.

[0425] Aqueous suspensions contain the active materials in a mixture with excipients suitable for the manufacture of aqueous suspensions. Such excipients are suspending agents, for example sodium carboxymethylcellulose, methylcellulose, hydropropyl-methylcellulose, sodium alginate, polyvinylpyrrolidone, gum tragacanth and gum acacia; dispersing or wetting agents can be a naturally-occurring phosphatide, for example, lecithin, or condensation products of an alkylene oxide with fatty acids, for example polyoxyethylene stearate, or condensation products of ethylene oxide with long chain aliphatic alcohols, for example heptadecaethyleneoxycetanol, or condensation products of ethylene oxide with partial esters derived from fatty acids and a hexitol such as polyoxyethylene sorbitol monooleate, or condensation products of ethylene oxide with partial esters derived from fatty acids and hexitol anhydrides, for example polyethylene sorbitan monooleate. The aqueous suspensions can also contain one or more preservatives, for example ethyl, or n-propyl p-hydroxybenzoate, one or more coloring agents, one or more flavoring agents, and one or more sweetening agents, such as sucrose or saccharin.

[0426] Oily suspensions can be formulated by suspending the active ingredients in a vegetable oil, for example arachis oil, olive oil, sesame oil or coconut oil, or in a mineral oil such as liquid paraffin. The oily suspensions can contain a thickening agent, for example beeswax, hard paraffin or cetyl alcohol. Sweetening agents and flavoring agents can be added to provide palatable oral preparations. These compositions can be preserved by the addition of an anti-oxidant such as ascorbic acid.

[0427] Dispersible powders and granules suitable for preparation of an aqueous suspension by the addition of water provide the active ingredient in admixture with a dispersing or wetting agent, suspending agent and one or more preservatives. Suitable dispersing or wetting agents or suspending agents are exemplified by those already mentioned above. Additional excipients, for example sweetening, flavoring and coloring agents, can also be present.

[0428] Pharmaceutical compositions of the invention can also be in the form of oil-in-water emulsions. The oily phase can be a vegetable oil or a mineral oil or mixtures of these. Suitable emulsifying agents can be naturally-occurring gums, for example gum acacia or gum tragacanth, naturally-occurring phosphatides, for example soy bean, lecithin, and esters or partial esters derived from fatty acids and hexitol, anhydrides, for example sorbitan monooleate, and condensation products of the said partial esters with ethylene oxide, for example polyoxyethylene sorbitan monooleate. The emulsions can also contain sweetening and flavoring agents.

[0429] Syrups and elixirs can be formulated with sweetening agents, for example glycerol, propylene glycol, sorbitol, glucose or sucrose. Such formulations can also contain a demulcent, a preservative and flavoring and coloring agents. The pharmaceutical compositions can be in the form of a sterile injectable aqueous or oleaginous suspension. This suspension can be formulated according to the known art using those suitable dispersing or wetting agents and suspending agents that have been mentioned above. The sterile injectable preparation can also be a sterile injectable solution or suspension in a non-toxic parentally acceptable diluent or solvent, for example as a solution in 1,3-butanediol. Among the acceptable vehicles and solvents that can be employed are water, Ringer's solution and isotonic sodium chloride solution. In addition, sterile, fixed oils are conventionally employed as a solvent or suspending medium. For this purpose, any bland fixed oil can be employed including synthetic mono- or diglycerides. In addition, fatty acids such as oleic acid find use in the preparation of injectables.

[0430] The nucleic acid molecules of the invention can also be administered in the form of suppositories, e.g., for rectal administration of the drug. These compositions can be prepared by mixing the drug with a suitable non-irritating excipient that is solid at ordinary temperatures but liquid at the rectal temperature and will therefore melt in the rectum to release the drug. Such materials include cocoa butter and polyethylene glycols.

[0431] Nucleic acid molecules of the invention can be administered parenterally in a sterile medium. The drug, depending on the vehicle and concentration used, can either be suspended or dissolved in the vehicle. Advantageously, adjuvants such as local anesthetics, preservatives and buffering agents can be dissolved in the vehicle.

[0432] Dosage levels of the order of from about 0.1 mg to about 140 mg per kilogram of body weight per day are useful in the treatment of the above-indicated conditions (about 0.5 mg to about 7 g per subject per day). The amount of active ingredient that can be combined with the carrier materials to produce a single dosage form varies depending upon the host treated and the particular mode of administration. Dosage unit forms generally contain between from about 1 mg to about 500 mg of an active ingredient.

[0433] It is understood that the specific dose level for any particular subject depends upon a variety of factors including the activity of the specific compound employed, the age, body weight, general health, sex, diet, time of administration, route of administration, and rate of excretion, drug combination and the severity of the particular disease undergoing therapy.

[0434] For administration to non-human animals, the composition can also be added to the animal feed or drinking water. It can be convenient to formulate the animal feed and drinking water compositions so that the animal takes in a therapeutically appropriate quantity of the composition along with its diet. It can also be convenient to present the composition as a premix for addition to the feed or drinking water.

[0435] The nucleic acid molecules of the present invention can also be administered to a subject in combination with other therapeutic compounds to increase the overall therapeutic effect. The use of multiple compounds to treat an indication can increase the beneficial effects while reducing the presence of side effects.

[0436] In one embodiment, the invention comprises compositions suitable for administering nucleic acid molecules of the invention to specific cell types. For example, the asialoglycoprotein receptor (ASGPr) (Wu and Wu, 1987, J. Biol. Chem. 262, 4429-4432) is unique to hepatocytes and binds branched galactose-terminal glycoproteins, such as asialoorosomucoid (ASOR). In another example, the folate receptor is overexpressed in many cancer cells. Binding of such glycoproteins, synthetic glycoconjugates, or folates to the receptor takes place with an affinity that strongly depends on the degree of branching of the oligosaccharide chain, for example, triatennary structures are bound with greater affinity than biatenarry or monoatennary chains (Baenziger and Fiete, 1980, Cell, 22, 611-620; Connolly et al., 1982, J. Biol. Chem., 257, 939-945). Lee and Lee, 1987, Glycoconjugate J., 4, 317-328, obtained this high specificity through the use of N-acetyl-D-galactosamine as the carbohydrate moiety, which has higher affinity for the receptor, compared to galactose. This “clustering effect” has also been described for the binding and uptake of mannosyl-terminating glycoproteins or glycoconjugates (Ponpipom et al., 1981, J. Med. Chem., 24, 1388-1395). The use of galactose, galactosamine, or folate based conjugates to transport exogenous compounds across cell membranes can provide a targeted delivery approach to, for example, the treatment of liver disease, cancers of the liver, or other cancers. The use of bioconjugates can also provide a reduction in the required dose of therapeutic compounds required for treatment. Furthermore, therapeutic bioavailability, pharmacodynamics, and pharmacokinetic parameters can be modulated through the use of nucleic acid bioconjugates of the invention. Non-limiting examples of such bioconjugates are described in Vargeese et al., U.S. Ser. No. 10/201,394, filed Aug. 13, 2001; and Matulic-Adamic et al., U.S. Ser. No. 60/362,016, filed Mar. 6, 2002.

[0437] Alternatively, certain siNA molecules of the instant invention can be expressed within cells from eukaryotic promoters (e.g., Izant and Weintraub, 1985, Science, 229, 345; McGarry and Lindquist, 1986, Proc. Natl. Acad. Sci., USA 83, 399; Scanlon et al., 1991, Proc. Natl. Acad. Sci. USA, 88, 10591-5; Kashani-Sabet et al., 1992, Antisense Res. Dev., 2, 3-15; Dropulic et al., 1992, J. Virol., 66, 1432-41; Weerasinghe et al., 1991, J. Virol., 65, 5531-4; Ojwang et al., 1992, Proc. Natl. Acad. Sci. USA, 89, 10802-6; Chen et al., 1992, Nucleic Acids Res., 20, 4581-9; Sarver et al., 1990 Science, 247, 1222-1225; Thompson et al., 1995, Nucleic Acids Res., 23, 2259; Good et al., 1997, Gene Therapy, 4, 45. Those skilled in the art realize that any nucleic acid can be expressed in eukaryotic cells from the appropriate DNA/RNA vector. The activity of such nucleic acids can be augmented by their release from the primary transcript by a enzymatic nucleic acid (Draper et al., PCT WO 93/23569, and Sullivan et al., PCT WO 94/02595; Ohkawa et al., 1992, Nucleic Acids Symp. Ser., 27, 15-6; Taira et al., 1991, Nucleic Acids Res., 19, 5125-30; Ventura et al., 1993, Nucleic Acids Res., 21, 3249-55; Chowrira et al., 1994, J. Biol. Chem., 269, 25856.

[0438] In another aspect of the invention, RNA molecules of the present invention can be expressed from transcription units (see for example Couture et al., 1996, TIG., 12, 510) inserted into DNA or RNA vectors. The recombinant vectors can be DNA plasmids or viral vectors. siNA expressing viral vectors can be constructed based on, but not limited to, adeno-associated virus, retrovirus, adenovirus, or alphavirus. In another embodiment, pol III based constructs are used to express nucleic acid molecules of the invention (see for example Thompson, U.S. Pats. Nos. 5,902,880 and 6,146,886). The recombinant vectors capable of expressing the siNA molecules can be delivered as described above, and persist in target cells. Alternatively, viral vectors can be used that provide for transient expression of nucleic acid molecules. Such vectors can be repeatedly administered as necessary. Once expressed, the siNA molecule interacts with the target mRNA and generates an RNAi response. Delivery of siNA molecule expressing vectors can be systemic, such as by intravenous or intra-muscular administration, by administration to target cells ex-planted from a subject followed by reintroduction into the subject, or by any other means that would allow for introduction into the desired target cell (for a review see Couture et al., 1996, TIG., 12, 510).

[0439] In one aspect the invention features an expression vector comprising a nucleic acid sequence encoding at least one siNA molecule of the instant invention. The expression vector can encode one or both strands of a siNA duplex, or a single self-complementary strand that self hybridizes into a siNA duplex. The nucleic acid sequences encoding the siNA molecules of the instant invention can be operably linked in a manner that allows expression of the siNA molecule (see for example Paul et al., 2002, Nature Biotechnology, 19, 505; Miyagishi and Taira, 2002, Nature Biotechnology, 19, 497; Lee et al., 2002, Nature Biotechnology, 19, 500; and Novina et al., 2002, Nature Medicine, advance online publication doi: 10.1038/nm725).

[0440] In another aspect, the invention features an expression vector comprising: a) a transcription initiation region (e.g., eukaryotic pol I, II or III initiation region); b) a transcription termination region (e.g., eukaryotic pol I, II or III termination region); and c) a nucleic acid sequence encoding at least one of the siNA molecules of the instant invention, wherein said sequence is operably linked to said initiation region and said termination region in a manner that allows expression and/or delivery of the siNA molecule. The vector can optionally include an open reading frame (ORF) for a protein operably linked on the 5′ side or the 3′-side of the sequence encoding the siNA of the invention; and/or an intron (intervening sequences).

[0441] Transcription of the siNA molecule sequences can be driven from a promoter for eukaryotic RNA polymerase I (pol I), RNA polymerase II (pol II), or RNA polymerase III (pol 111). Transcripts from pol II or pol III promoters are expressed at high levels in all cells; the levels of a given pol II promoter in a given cell type depends on the nature of the gene regulatory sequences (enhancers, silencers, etc.) present nearby. Prokaryotic RNA polymerase promoters are also used, providing that the prokaryotic RNA polymerase enzyme is expressed in the appropriate cells (Elroy-Stein and Moss, 1990, Proc. Natl. Acad. Sci. USA, 87, 6743-7; Gao and Huang 1993, Nucleic Acids Res., 21, 2867-72; Lieber et al., 1993, Methods Enzymol., 217, 47-66; Zhou et al., 1990, Mol. Cell. Biol., 10, 4529-37). Several investigators have demonstrated that nucleic acid molecules expressed from such promoters can function in mammalian cells (e.g. Kashani-Sabet et al., 1992, Antisense Res. Dev., 2, 3-15; Ojwang et al., 1992, Proc. Natl. Acad. Sci. USA, 89, 10802-6; Chen et al., 1992, Nucleic Acids Res., 20, 4581-9; Yu et al., 1993, Proc. Natl. Acad. Sci. USA, 90, 6340-4; L'Huillier et al., 1992, EMBO J., 11, 4411-8; Lisziewicz et al., 1993, Proc. Natl. Acad. Sci. U S. A, 90, 80004; Thompson et al., 1995, Nucleic Acids Res., 23, 2259; Sullenger & Cech, 1993, Science, 262, 1566). More specifically, transcription units such as the ones derived from genes encoding U6 small nuclear (snRNA), transfer RNA (tRNA) and adenovirus VA RNA are useful in generating high concentrations of desired RNA molecules such as siNA in cells (Thompson et al., supra; Couture and Stinchcomb, 1996, supra; Noonberg et al., 1994, Nucleic Acid Res., 22, 2830; Noonberg et al., U.S. Pat. No. 5,624,803; Good et al., 1997, Gene Ther., 4, 45; Beigelman et al., International PCT Publication No. WO 96/18736. The above siNA transcription units can be incorporated into a variety of vectors for introduction into mammalian cells, including but not restricted to, plasmid DNA vectors, viral DNA vectors (such as adenovirus or adeno-associated virus vectors), or viral RNA vectors (such as retroviral or alphavirus vectors) (for a review see Couture and Stinchcomb, 1996, supra).

[0442] In another aspect the invention features an expression vector comprising a nucleic acid sequence encoding at least one of the siNA molecules of the invention in a manner that allows expression of that siNA molecule. The expression vector comprises in one embodiment; a) a transcription initiation region; b) a transcription termination region; and c) a nucleic acid sequence encoding at least one strand of the siNA molecule, wherein the sequence is operably linked to the initiation region and the termination region in a manner that allows expression and/or delivery of the siNA molecule.

[0443] In another embodiment the expression vector comprises: a) a transcription initiation region; b) a transcription termination region; c) an open reading frame; and d) a nucleic acid sequence encoding at least one strand of a siNA molecule, wherein the sequence is operably linked to the 3′-end of the open reading frame and wherein the sequence is operably linked to the initiation region, the open reading frame and the termination region in a manner that allows expression and/or delivery of the siNA molecule. In yet another embodiment, the expression vector comprises: a) a transcription initiation region; b) a transcription termination region; c) an intron; and d) a nucleic acid sequence encoding at least one siNA molecule, wherein the sequence is operably linked to the initiation region, the intron and the termination region in a manner which allows expression and/or delivery of the nucleic acid molecule.

[0444] In another embodiment, the expression vector comprises: a) a transcription initiation region; b) a transcription termination region; c) an intron; d) an open reading frame; and e) a nucleic acid sequence encoding at least one strand of a siNA molecule, wherein the sequence is operably linked to the 3′-end of the open reading frame and wherein the sequence is operably linked to the initiation region, the intron, the open reading frame and the termination region in a manner which allows expression and/or delivery of the siNA molecule.

HCV Biology and Biochemistry

[0445] In 1989, the Hepatitis C Virus (HCV) was determined to be an RNA virus and was identified as the causative agent of most non-A non-B viral Hepatitis (Choo et al., 1989, Science, 244, 359-362). Unlike retroviruses such as HIV, HCV does not go though a DNA replication phase and no integrated forms of the viral genome into the host chromosome have been detected (Houghton et al., 1991, Hepatology, 14, 381-388). Rather, replication of the coding (plus) strand is mediated by the production of a replicative (minus) strand leading to the generation of several copies of plus strand HCV RNA. The genome consists of a single, large, open-reading frame that is translated into a polyprotein (Kato et al., 1991, FEBS Letters, 280: 325-328). This polyprotein subsequently undergoes post-translational cleavage, producing several viral proteins (Leinbach et al., 1994, Virology, 204:163-169).

[0446] Examination of the 9.5-kilobase genome of HCV has demonstrated that the viral nucleic acid can mutate at a high rate (Smith et al., 1997 Mol. Evol. 45, 238-246). This rate of mutation has led to the evolution of several distinct genotypes of HCV that share approximately 70% sequence identity (Simmonds et al., 1994, J. Gen. Virol. 75, 1053-1061). It is important to note that these sequences are evolutionarily quite distant. For example, the genetic identity between humans and primates such as the chimpanzee is approximately 98%. In addition, it has been demonstrated that an HCV infection in an individual patient is composed of several distinct and evolving quasispecies that have 98% identity at the RNA level. Thus, the HCV genome is hypervariable and continuously changing. Although the HCV genome is hypervariable, there are 3 regions of the genome that are highly conserved. These conserved sequences occur in the 5′ and 3′ non-coding regions as well as the 5′-end of the core protein coding region and are thought to be vital for HCV RNA replication as well as translation of the HCV polyprotein. Thus, therapeutic agents that target these conserved HCV genomic regions may have a significant impact over a wide range of HCV genotypes. Moreover, it is unlikely that drug resistance will occur with enzymatic nucleic acids specific to conserved regions of the HCV genome. In contrast, therapeutic modalities that target inhibition of enzymes such as the viral proteases or helicase are likely to result in the selection for drug resistant strains since the RNA for these viral encoded enzymes is located in the hypervariable portion of the HCV genome.

[0447] After initial exposure to HCV, a patient experiences a transient rise in liver enzymes, which indicates that inflammatory processes are occurring (Alter et al, IN: Seeff L B, Lewis J H, eds. Current Perspectives in Hepatology. New York: Plenum Medical Book Co; 1989:83-89). This elevation in liver enzymes occurs at least 4 weeks after the initial exposure and may last for up to two months (Farci et al., 1991, New England Journal of Medicine. 325, 98-104). Prior to the rise in liver enzymes, it is possible to detect HCV RNA in the patient's serum using RT-PCR analysis (Takahashi et al., 1993, American Journal of Gastroenterology. 88, 240-243). This stage of the disease is called the acute stage and usually goes undetected since 75% of patients with acute viral hepatitis from HCV infection are asymptomatic. The remaining 25% of these patients develop jaundice or other symptoms of hepatitis.

[0448] Although acute HCV infection is a benign disease, as many as 80% of acute HCV patients progress to chronic liver disease as evidenced by persistent elevation of serum alanine aminotransferase (ALT) levels and by continual presence of circulating HCV RNA (Sherlock, 1992, Lancet, 339, 802). The natural progression of chronic HCV infection over a 10 to 20 year period leads to cirrhosis in 20 to 50% of patients (Davis et al., 1993, Infectious Agents and Disease, 2, 150, 154) and progression of HCV infection to hepatocellular carcinoma has been well documented (Liang et al., 1993, Hepatology. 18, 1326-1333; Tong et al., 1994, Western Journal of Medicine, 160, 133-138). There have been no studies that have determined sub-populations that are most likely to progress to cirrhosis and/or hepatocellular carcinoma, thus all patients have equal risk of progression.

[0449] It is important to note that the survival for patients diagnosed with hepatocellular carcinoma is only 0.9 to 12.8 months from initial diagnosis (Takahashi et al., 1993, American Journal of Gastroenterology. 88, 240-243). Treatment of hepatocellular carcinoma with chemotherapeutic agents has not proven effective and only 10% of patients will benefit from surgery due to extensive tumor invasion of the liver (Trinchet et al., 1994, Presse Medicine. 23, 831-833). Given the aggressive nature of primary hepatocellular carcinoma, the only viable treatment alternative to surgery is liver transplantation (Pichlmayr et al., 1994, Hepatology. 20, 33S-40S).

[0450] Upon progression to cirrhosis, patients with chronic HCV infection present with clinical features, which are common to clinical cirrhosis regardless of the initial cause (D'Amico et al., 1986, Digestive Diseases and Sciences. 31, 468-475). These clinical features may include: bleeding esophageal varices, ascites, jaundice, and encephalopathy (Zakim D, Boyer T D. Hepatology a textbook of liver disease. Second Edition Volume 1. 1990 W. B. Saunders Company. Philadelphia). In the early stages of cirrhosis, patients are classified as compensated, the stage at which the patient's liver is still able to detoxify metabolites in the blood-stream although liver tissue damage has occurred. In addition, most patients with compensated liver disease are asymptomatic and the minority with symptoms report only minor symptoms, such as dyspepsia and weakness. In the later stages of cirrhosis, patients are classified as decompensated, the stage at which the ability of the liver to detoxify metabolites in the bloodstream is diminished. It is at the decompensated stage that the clinical features described above present.

[0451] In 1986, D'Amico et al. described the clinical manifestations and survival rates in 1155 patients with both alcoholic and viral associated cirrhosis (D'Amico supra). Of the 1155 patients, 435 (37%) had compensated disease although 70% were asymptomatic at the beginning of the study. The remaining 720 patients (63%) had decompensated liver disease with 78% presenting with a history of ascites, 31% with jaundice, 17% had bleeding and 16% had encephalopathy. Hepatocellular carcinoma was observed in six (0.5%) patients with compensated disease and in 30 (2.6%) patients with decompensated disease.

[0452] Over the course of six years, the patients with compensated cirrhosis developed clinical features of decompensated disease at a rate of 10% per year. In most cases, ascites was the first presentation of decompensation. In addition, hepatocellular carcinoma developed in 59 patients who initially presented with compensated disease by the end of the six-year study.

[0453] With respect to survival, the D'Amico study indicated that the five-year survival rate for all patients in the study was only 40%. The six-year survival rate for the patients who initially had compensated cirrhosis was 54% while the six-year survival rate for patients who initially presented with decompensated disease was only 21%. There were no significant differences in the survival rates between the patients who had alcoholic cirrhosis and the patients with viral related cirrhosis. The major causes of death for the patients in the D'Amico study were liver failure in 49%; hepatocellular carcinoma in 22%; and bleeding in 13% (D'Amico supra).

[0454] Chronic Hepatitis C is a slowly progressing inflammatory disease of the liver, mediated by a virus (HCV) that can lead to cirrhosis, liver failure and/or hepatocellular carcinoma over a period of 10 to 20 years. In the US, it is estimated that infection with HCV accounts for 50,000 new cases of acute hepatitis in the United States each year (NIH Consensus Development Conference Statement on Management of Hepatitis C Mar. 1997). The prevalence of HCV in the United States is estimated at 1.8% and the CDC places the number of chronically infected Americans at approximately 4.5 million people. The CDC also estimates that up to 10,000 deaths per year are caused by chronic HCV infection.

[0455] Numerous well controlled clinical trials using interferon (IFN-alpha) in the treatment of chronic HCV infection have demonstrated that treatment three times a week results in lowering of serum ALT values in approximately 50% (40%-70%) of patients by the end of 6 months of therapy (Davis et al., 1989, New England Journal of Medicine, 321, 1501-1506; Marcellin et al., 1991, Hepatology, 13, 393-397; Tong et al., 1997, Hepatology, 26, 747-754; Tong et al., 1997, Hepatology, 26, 1640-1645). However, following cessation of interferon treatment, approximately 50% of the responding patients relapsed, resulting in a “durable” response rate as assessed by normalization of serum ALT concentrations of approximately 20-25%.

[0456] Direct measurement of HCV RNA is possible through use of either the branched-DNA or Reverse Transcriptase Polymerase Chain Reaction (RT-PCR) analysis. In general, RT-PCR methodology is more sensitive and leads to a more accurate assessment of the clinical course (Tong el aL, supra). Studies that have examined six months of type 1 interferon therapy using changes in HCV RNA values as a clinical endpoint have demonstrated that up to 35% of patients have a loss of HCV RNA by the end of therapy (Marcellin et al., supra). However, as with the ALT endpoint, about 50% of the patients relapse within six months following cessation of therapy, resulting in a durable virologic response of only 12% (Marcellin et al., supra). Studies that have examined 48 weeks of therapy have demonstrated that the sustained virological response is up to 25% (NIH consensus statement: 1997). Thus, standard of care for treatment of chronic HCV infection with type 1 interferon is now 48 weeks of therapy using changes in HCV RNA concentrations as the primary assessment of efficacy (Hooffnagle et al., 1997, New England Journal of Medicine, 336, 347-356).

[0457] Side effects resulting from treatment with type 1 interferons can be divided into four general categories, which include: (1) Influenza-like symptoms; (2) Neuropsychiatric; (3) Laboratory abnormalities; and (4) Miscellaneous (Dusheiko et al., 1994, Journal of Viral Hepatitis, 1, 3-5). Examples of influenza-like symptoms include fatigue, fever, myalgia, malaise, appetite loss, tachycardia, rigors, headache, and arthralgias. The influenza-like symptoms are usually short-lived and tend to abate after the first four weeks of dosing (Dushieko et al., supra). Neuropsychiatric side effects include irritability, apathy, mood changes, insomnia, cognitive changes, and depression. The most important of these neuropsychiatric side effects is depression and patients who have a history of depression should not be given type 1 interferon. Laboratory abnormalities include reduction in myeloid cells, including granulocytes, platelets and to a lesser extent red blood cells. These changes in blood cell counts rarely lead to any significant clinical sequellae (Dushieko et al., supra). In addition, increases in triglyceride concentrations and elevations in serum alanine and aspartate aminotransferase concentration have been observed. Finally, thyroid abnormalities have been reported. These thyroid abnormalities are usually reversible after cessation of interferon therapy and can be controlled with appropriate medication while on therapy. Miscellaneous side effects include nausea, diarrhea, abdominal and back pain, pruritus, alopecia, and rhinorrhea. In general, most side effects will abate after 4 to 8 weeks of therapy (Dushieko et al., supra).

[0458] The use of small interfering nucleic acid molecules targeting HCV genes and cellular/host gene targets associated with the HIV life cycle therefore provides a class of novel therapeutic agents that can be used in the treatment and diagnosis of HCV infection, liver failure, hepatocellular carcinoma, cirrhosis or any other disease or condition that responds to modulation (e.g., inhibition) of HCV genes in a subject or organism.

### EXAMPLES

[0459] The following are non-limiting examples showing the selection, isolation, synthesis and activity of nucleic acids of the instant invention.

### Example 1

### Tandem Synthesis of siNA Constructs

[0460] Exemplary siNA molecules of the invention are synthesized in tandem using a cleavable linker, for example, a succinyl-based linker. Tandem synthesis as described herein is followed by a one-step purification process that provides RNAi molecules in high yield. This approach is highly amenable to siNA synthesis in support of high throughput RNAi screening, and can be readily adapted to multi-column or multi-well synthesis platforms.

[0461] After completing a tandem synthesis of a siNA oligo and its complement in which the 5′-terminal dimethoxytrityl (5′-O-DMT) group remains intact (trityl on synthesis), the oligonucleotides are deprotected as described above. Following deprotection, the siNA sequence strands are allowed to spontaneously hybridize. This hybridization yields a duplex in which one strand has retained the 5′-O-DMT group while the complementary strand comprises a terminal 5′-hydroxyl. The newly formed duplex behaves as a single molecule during routine solid-phase extraction purification (Trityl-On purification) even though only one molecule has a dimethoxytrityl group. Because the strands form a stable duplex, this dimethoxytrityl group (or an equivalent group, such as other trityl groups or other hydrophobic moieties) is all that is required to purify the pair of oligos, for example, by using a C 18 cartridge.

[0462] Standard phosphoramidite synthesis chemistry is used up to the point of introducing a tandem linker, such as an inverted deoxy abasic succinate or glyceryl succinate linker (see FIG. 1) or an equivalent cleavable linker. A non-limiting example of linker coupling conditions that can be used includes a hindered base such as diisopropylethylamine (DIPA) and/or DMAP in the presence of an activator reagent such as Bromotripyrrolidinophosphoniumhexaflurorophosphate (PyBrOP). After the linker is coupled, standard synthesis chemistry is utilized to complete synthesis of the second sequence leaving the terminal the 5′-O-DMT intact. Following synthesis, the resulting oligonucleotide is deprotected according to the procedures described herein and quenched with a suitable buffer, for example with 50 mM NaOAc or 1.5M NH₄H₂CO₃.

[0463] Purification of the siNA duplex can be readily accomplished using solid phase extraction, for example, using a Waters C18 SepPak 1 g cartridge conditioned with 1 column volume (CV) of acetonitrile, 2 CV H₂O, and 2 CV 50 mM NaOAc. The sample is loaded and then washed with 1 CV H₂O or 50 mM NaOAc. Failure sequences are eluted with 1 CV 14% ACN (Aqueous with 50 mM NaOAc and 50 mM NaCl). The column is then washed, for example with 1 CV H₂O followed by on-column detritylation, for example by passing 1 CV of 1% aqueous trifluoroacetic acid (TFA) over the column, then adding a second CV of 1% aqueous TFA to the column and allowing to stand for approximately 10 minutes. The remaining TFA solution is removed and the column washed with H₂O followed by 1 CV 1 M NaCl and additional H₂O. The siNA duplex product is then eluted, for example, using 1 CV 20% aqueous CAN.

[0464] FIG. 2 provides an example of MALDI-TOF mass spectrometry analysis of a purified siNA construct in which each peak corresponds to the calculated mass of an individual siNA strand of the siNA duplex. The same purified siNA provides three peaks when analyzed by capillary gel electrophoresis (CGE), one peak presumably corresponding to the duplex siNA, and two peaks presumably corresponding to the separate siNA sequence strands. Ion exchange HPLC analysis of the same siNA contract only shows a single peak. Testing of the purified siNA construct using a luciferase reporter assay described below demonstrated the same RNAi activity compared to siNA constructs generated from separately synthesized oligonucleotide sequence strands.

### Example 2

### Identification of Potential siNA Target Sites in any RNA Sequence

[0465] The sequence of an RNA target of interest, such as a viral or human mRNA transcript, is screened for target sites, for example by using a computer folding algorithm. In a non-limiting example, the sequence of a gene or RNA gene transcript derived from a database, such as Genbank, is used to generate siNA targets having complementarity to the target. Such sequences can be obtained from a database, or can be determined experimentally as known in the art. Target sites that are known, for example, those target sites determined to be effective target sites based on studies with other nucleic acid molecules, for example ribozymes or antisense, or those targets known to be associated with a disease or condition such as those sites containing mutations or deletions, can be used to design siNA molecules targeting those sites. Various parameters can be used to determine which sites are the most suitable target sites within the target RNA sequence. These parameters include but are not limited to secondary or tertiary RNA structure, the nucleotide base composition of the target sequence, the degree of homology between various regions of the target sequence, or the relative position of the target sequence within the RNA transcript. Based on these determinations, any number of target sites within the RNA transcript can be chosen to screen siNA molecules for efficacy, for example by using in vitro RNA cleavage assays, cell culture, or animal models. In a non-limiting example, anywhere from 1 to 1000 target sites are chosen within the transcript based on the size of the siNA construct to be used. High throughput screening assays can be developed for screening siNA molecules using methods known in the art, such as with multi-well or multi-plate assays to determine efficient reduction in target gene expression.

### Example 3

### Selection of siNA Molecule Target Sites in a RNA

[0466] The following non-limiting steps can be used to carry out the selection of siNAs targeting a given gene sequence or transcript.

[0467] 1. The target sequence is parsed in silico into a list of all fragments or subsequences of a particular length, for example 23 nucleotide fragments, contained within the target sequence. This step is typically carried out using a custom Perl script, but commercial sequence analysis programs such as Oligo, MacVector, or the GCG Wisconsin Package can be employed as well.

[0468] 2. In some instances the siNAs correspond to more than one target sequence; such would be the case for example in targeting different transcripts of the same gene, targeting different transcripts of more than one gene, or for targeting both the human gene and an animal homolog. In this case, a subsequence list of a particular length is generated for each of the targets, and then the lists are compared to find matching sequences in each list. The subsequences are then ranked according to the number of target sequences that contain the given subsequence; the goal is to find subsequences that are present in most or all of the target sequences. Alternately, the ranking can identify subsequences that are unique to a target sequence, such as a mutant target sequence. Such an approach would enable the use of siNA to target specifically the mutant sequence and not effect the expression of the normal sequence.

[0469] 3. In some instances the siNA subsequences are absent in one or more sequences while present in the desired target sequence; such would be the case if the siNA targets a gene with a paralogous family member that is to remain untargeted. As in case 2 above, a subsequence list of a particular length is generated for each of the targets, and then the lists are compared to find sequences that are present in the target gene but are absent in the untargeted paralog.

4. The ranked siNA subsequences can be further analyzed and ranked according to GC content. A preference can be given to sites containing 30-70% GC, with a further preference to sites containing 40-60% GC.

5. The ranked siNA subsequences can be further analyzed and ranked according to self-folding and internal hairpins. Weaker internal folds are preferred; strong hairpin structures are to be avoided.

[0470] 6. The ranked siNA subsequences can be further analyzed and ranked according to whether they have runs of GGG or CCC in the sequence. GGG (or even more Gs) in either strand can make oligonucleotide synthesis problematic and can potentially interfere with RNAi activity, so it is avoided whenever better sequences are available. CCC is searched in the target strand because that will place GGG in the antisense strand.

[0471] 7. The ranked siNA subsequences can be further analyzed and ranked according to whether they have the dinucleotide UU (uridine dinucleotide) on the 3′-end of the sequence, and/or AA on the 5′-end of the sequence (to yield 3′ UU on the antisense sequence). These sequences allow one to design siNA molecules with terminal TT thymidine dinucleotides.

[0472] 8. Four or five target sites are chosen from the ranked list of subsequences as described above. For example, in subsequences having 23 nucleotides, the right 21 nucleotides of each chosen 23-mer subsequence are then designed and synthesized for the upper (sense) strand of the siNA duplex, while the reverse complement of the left 21 nucleotides of each chosen 23-mer subsequence are then designed and synthesized for the lower (antisense) strand of the siNA duplex (see Tables II and III). If terminal TT residues are desired for the sequence (as described in paragraph 7), then the two 3′ terminal nucleotides of both the sense and antisense strands are replaced by TT prior to synthesizing the oligos.

9. The siNA molecules are screened in an in vitro, cell culture or animal model system to identify the most active siNA molecule or the most preferred target site within the target RNA sequence.

[0473] 10. Other design considerations can be used when selecting target nucleic acid sequences, see, for example, Reynolds et al., 2004, Nature Biotechnology Advanced Online Publication, 1 Feb. 2004, doi:10.1038/nbt936 and Ui-Tei et al., 2004, Nucleic Acids Research, 32, doi:10.1093/nar/gkh247.

[0474] In an alternate approach, a pool of siNA constructs specific to a HCV target sequence is used to screen for target sites in cells expressing HCV RNA, such as human hepatoma (Huh7) cells (see for example Randall et al., 2003, PNAS USA, 100, 235-240). The general strategy used in this approach is shown in FIG. 9. A non-limiting example of such is a pool comprising sequences having any of SEQ ID NOS 1-2027. Cells expressing HCV are transfected with the pool of siNA constructs and cells that demonstrate a phenotype associated with HCV inhibition are sorted. The pool of siNA constructs can be expressed from transcription cassettes inserted into appropriate vectors (see for example FIG. 7 and FIG. 8). The siNA from cells demonstrating a positive phenotypic change (e.g., decreased HCV mRNA levels or decreased HCV protein expression), are sequenced to determine the most suitable target site(s) within the target HCV RNA sequence.

### Example 4

### HCV Targeted siNA Design

[0475] siNA target sites were chosen by analyzing sequences of the HCV RNA target and optionally prioritizing the target sites on the basis of folding (structure of any given sequence analyzed to determine siNA accessibility to the target), by using a library of siNA molecules as described in Example 3, or alternately by using an in vitro siNA system as described in Example 6 herein. siNA molecules were designed that could bind each target and are optionally individually analyzed by computer folding to assess whether the siNA molecule can interact with the target sequence. Varying the length of the siNA molecules can be chosen to optimize activity. Generally, a sufficient number of complementary nucleotide bases are chosen to bind to, or otherwise interact with, the target RNA, but the degree of complementarity can be modulated to accommodate siNA duplexes or varying length or base composition. By using such methodologies, siNA molecules can be designed to target sites within any known RNA sequence, for example those RNA sequences corresponding to the any gene transcript.

[0476] Chemically modified siNA constructs are designed to provide nuclease stability for systemic administration in vivo and/or improved pharmacokinetic, localization, and delivery properties while preserving the ability to mediate RNAi activity. Chemical modifications as described herein are introduced synthetically using synthetic methods described herein and those generally known in the art. The synthetic siNA constructs are then assayed for nuclease stability in serum and/or cellular/tissue extracts (e.g. liver extracts). The synthetic siNA constructs are also tested in parallel for RNAi activity using an appropriate assay, such as a luciferase reporter assay as described herein or another suitable assay that can quantity RNAi activity. Synthetic siNA constructs that possess both nuclease stability and RNAi activity can be further modified and re-evaluated in stability and activity assays. The chemical modifications of the stabilized active siNA constructs can then be applied to any siNA sequence targeting any chosen RNA and used, for example, in target screening assays to pick lead siNA compounds for therapeutic development (see for example FIG. 11).

### Example 5

### Chemical Synthesis and Purification of siNA

[0477] siNA molecules can be designed to interact with various sites in the RNA message, for example, target sequences within the RNA sequences described herein. The sequence of one strand of the siNA molecule(s) is complementary to the target site sequences described above. The siNA molecules can be chemically synthesized using methods described herein. Inactive siNA molecules that are used as control sequences can be synthesized by scrambling the sequence of the siNA molecules such that it is not complementary to the target sequence. Generally, siNA constructs can by synthesized using solid phase oligonucleotide synthesis methods as described herein (see for example Usman et al., U.S. Pat. Nos. 5,804,683; 5,831,071; 5,998,203; 6,117,657; 6,353,098; 6,362,323; 6,437,117; 6,469,158; Scaringe et al., U.S. Pat. Nos. 6,111,086; 6,008,400; 6,111,086 all incorporated by reference herein in their entirety).

[0478] In a non-limiting example, RNA oligonucleotides are synthesized in a stepwise fashion using the phosphoramidite chemistry as is known in the art. Standard phosphoramidite chemistry involves the use of nucleosides comprising any of 5′-O-dimethoxytrityl, 2′-O-tert-butyldimethylsilyl, 3′-O-2-Cyanoethyl N,N-diisopropylphos-phoroamidite groups, and exocyclic amine protecting groups (e.g. N6-benzoyl adenosine, N4 acetyl cytidine, and N2-isobutyryl guanosine). Alternately, 2′-O-Silyl Ethers can be used in conjunction with acid-labile 2′-O-orthoester protecting groups in the synthesis of RNA as described by Scaringe supra. Differing 2′ chemistries can require different protecting groups, for example 2′-deoxy-2′-amino nucleosides can utilize N-phthaloyl protection as described by Usman et al., U.S. Pat. No. 5,631,360, incorporated by reference herein in its entirety).

[0479] During solid phase synthesis, each nucleotide is added sequentially (3′- to 5′-direction) to the solid support-bound oligonucleotide. The first nucleoside at the 3′-end of the chain is covalently attached to a solid support (e.g., controlled pore glass or polystyrene) using various linkers. The nucleotide precursor, a ribonucleoside phosphoramidite, and activator are combined resulting in the coupling of the second nucleoside phosphoramidite onto the 5′-end of the first nucleoside. The support is then washed and any unreacted 5′-hydroxyl groups are capped with a capping reagent such as acetic anhydride to yield inactive 5′-acetyl moieties. The trivalent phosphorus linkage is then oxidized to a more stable phosphate linkage. At the end of the nucleotide addition cycle, the 5′-O-protecting group is cleaved under suitable conditions (e.g., acidic conditions for trityl-based groups and Fluoride for silyl-based groups). The cycle is repeated for each subsequent nucleotide.

[0480] Modification of synthesis conditions can be used to optimize coupling efficiency, for example by using differing coupling times, differing reagent/phosphoramidite concentrations, differing contact times, differing solid supports and solid support linker chemistries depending on the particular chemical composition of the siNA to be synthesized. Deprotection and purification of the siNA can be performed as is generally described in Usman et al., U.S. Pat. No. 5,831,071, U.S. Pat. No. 6,353,098, U.S. Pat. No. 6,437,117, and Bellon et al., U.S. Pat. No. 6,054,576, U.S. Pat. No. 6,162,909, U.S. Pat. No. 6,303,773, or Scaringe supra, incorporated by reference herein in their entireties. Additionally, deprotection conditions can be modified to provide the best possible yield and purity of siNA constructs. For example, applicant has observed that oligonucleotides comprising 2′-deoxy-2′-fluoro nucleotides can degrade under inappropriate deprotection conditions. Such oligonucleotides are deprotected using aqueous methylamine at about 35° C. for 30 minutes. If the 2′-deoxy-2′-fluoro containing oligonucleotide also comprises ribonucleotides, after deprotection with aqueous methylamine at about 35° C. for 30 minutes, TEA-HF is added and the reaction maintained at about 65° C. for an additional 15 minutes.

### Example 6

### RNAi In Vitro Assay to Assess siNA Activity

[0481] An in vitro assay that recapitulates RNAi in a cell-free system is used to evaluate siNA constructs targeting HCV RNA targets. The assay comprises the system described by Tuschl et al., 1999, Genes and Development, 13, 3191-3197 and Zamore et al., 2000, Cell, 101, 25-33 adapted for use with HCV target RNA. A Drosophila extract derived from syncytial blastoderm is used to reconstitute RNAi activity in vitro. Target RNA is generated via in vitro transcription from an appropriate HCV expressing plasmid using T7 RNA polymerase or via chemical synthesis as described herein. Sense and antisense siNA strands (for example 20 uM each) are annealed by incubation in buffer (such as 100 mM potassium acetate, 30 mM HEPES-KOH, pH 7.4, 2 mM magnesium acetate) for 1 minute at 90° C. followed by 1 hour at 37° C., then diluted in lysis buffer (for example 100 mM potassium acetate, 30 mM HEPES-KOH at pH 7.4, 2 mM magnesium acetate). Annealing can be monitored by gel electrophoresis on an agarose gel in TBE buffer and stained with ethidium bromide. The Drosophila lysate is prepared using zero to two-hour-old embryos from Oregon R flies collected on yeasted molasses agar that are dechorionated and lysed. The lysate is centrifuged and the supernatant isolated. The assay comprises a reaction mixture containing 50% lysate [vol/vol], RNA (10-50 pM final concentration), and 10% [vol/vol] lysis buffer containing siNA (10 nM final concentration). The reaction mixture also contains 10 mM creatine phosphate, 10 ug/ml creatine phosphokinase, 100 um GTP, 100 uM UTP, 100 uM CTP, 500 uM ATP, 5 mM DTT, 0.1 U/uL RNasin (Promega), and 100 uM of each amino acid. The final concentration of potassium acetate is adjusted to 100 mM. The reactions are pre-assembled on ice and preincubated at 25° C. for 10 minutes before adding RNA, then incubated at 25° C. for an additional 60 minutes. Reactions are quenched with 4 volumes of 1.25×Passive Lysis Buffer (Promega). Target RNA cleavage is assayed by RT-PCR analysis or other methods known in the art and are compared to control reactions in which siNA is omitted from the reaction.

[0482] Alternately, internally-labeled target RNA for the assay is prepared by in vitro transcription in the presence of [alpha-³²P] CTP, passed over a G50 Sephadex column by spin chromatography and used as target RNA without further purification. Optionally, target RNA is 5′-³²P-end labeled using T4 polynucleotide kinase enzyme. Assays are performed as described above and target RNA and the specific RNA cleavage products generated by RNAi are visualized on an autoradiograph of a gel. The percentage of cleavage is determined by PHOSPHOR IMAGER® (autoradiography) quantitation of bands representing intact control RNA or RNA from control reactions without siNA and the cleavage products generated by the assay.

[0483] In one embodiment, this assay is used to determine target sites in the HCV RNA target for siNA mediated RNAi cleavage, wherein a plurality of siNA constructs are screened for RNAi mediated cleavage of the HCV RNA target, for example, by analyzing the assay reaction by electrophoresis of labeled target RNA, or by northern blotting, as well as by other methodology well known in the art.

### Example 7

### Nucleic Acid Inhibition of HCV Target RNA

[0484] siNA molecules targeted to the human HCV RNA are designed and synthesized as described above. These nucleic acid molecules can be tested for cleavage activity in vivo, for example, using the following procedure. The target sequences and the nucleotide location within the HCV RNA are given in Tables II and III.

[0485] Two formats are used to test the efficacy of siNAs targeting HCV. First, the reagents are tested in cell culture using, for example, human hepatoma (Huh7) cells, to determine the extent of RNA and protein inhibition. siNA reagents (e.g.; see Tables II and III) are selected against the HCV target as described herein. RNA inhibition is measured after delivery of these reagents by a suitable transfection agent to, for example, cultured epidermal keratinocytes. Relative amounts of target RNA are measured versus actin using real-time PCR monitoring of amplification (eg., ABI 7700 TAQMAN®). A comparison is made to a mixture of oligonucleotide sequences made to unrelated targets or to a randomized siNA control with the same overall length and chemistry, but randomly substituted at each position. Primary and secondary lead reagents are chosen for the target and optimization performed. After an optimal transfection agent concentration is chosen, a RNA time-course of inhibition is performed with the lead siNA molecule. In addition, a cell-plating format can be used to determine RNA inhibition.

[0486] In addition, a cell-plating format can be used to determine RNA inhibition. A non-limiting example of a multiple target screen to assay siNA mediated inhibition of HCV RNA is shown in FIG. 28. siNA constructs (Table III) were transfected at 25 nM into Huh7 cells and HCV RNA quantitated compared to untreated cells (“cells” column in the figure) and cells transfected with lipofectamine (“LFA2K” column in the figure). As shown in FIG. 28, several siNA constructs show significant inhibition of HCV RNA expression in the Huh7 replicon system. This system is described in Rice et al., U.S. Pat. No. 5,874,565 and U.S. Pat. No. 6,127,116, both incorporated by reference herein.

Delivery of siNA to Cells

[0487] Huh7b cells stably transfected with the HCV subgenomic replicon Clone A or Ava.5 are seeded, for example, at 8.5×10³ cells per well of a 96-well platein DMEM(Gibco) the day before transfection. siNA (final concentration, for example 25 nM) and cationic lipid Lipofectamine2000 (e.g., final concentration0.5 μl/well) are complexed in Optimem (Gibco) at 37° C. for 20 minutes inpolypropelyne microtubes. Following vortexing, the complexed siNA is added to each well and incubated for 24-72 hours.

TAQMAN® (Real-Time PCR Monitoring of Amplification) and Lightcycler Quantification of mRNA

[0488] Total RNA is prepared from cells following siNA delivery, for example, using Ambion Rnaqueous 4-PCR purification kit for large scale extractions, or Ambion Rnaqueous-96 purification kit for 96-well assays. For Taqman analysis, dual-labeled probes are synthesized with, for example, the reporter dyes FAM or VIC covalently linked at the 5′-end and the quencher dye TAMARA conjugated to the 3′-end. One-step RT-PCR amplifications are performed on, for example, an ABI PRISM 7700 Sequence detector using 50 uL reactions consisting of 10 uL total RNA, 100 nM forward primer, 100 mM reverse primer, 100 nM probe, 1×TaqMan PCR reaction buffer (PE-Applied Biosystems), 5.5 mM MgCl2, 100 uM each dATP, dCTP, dGTP and dTTP, 0.2U RNase Inhibitor (Promega), 0.025U AmpliTaq Gold (PE-Applied Biosystems) and 0.2U M-MLV Reverse Transcriptase (Promega). The thermal cycling conditions can consist of 30 minutes at 48° C., 10 minutes at 95° C., followed by 40 cycles of 15 seconds at 95° C. and 1 minute at 60° C. Quantitation of target mRNA level is determined relative to standards generated from serially diluted total cellular RNA (300, 100, 30, 10 ng/rxn) and normalizing to, for example, 36B4 mRNA in either parallel or same tube TaqMan reactions. For HCV Replicon mRNA quantitation, PCR primers and probe specific for the neomycin gene were used:

neo-forward primer,

(SEQ ID NO: 2032)

5′-CCGGCTACCTGCCCATTC-3′;
neo-reverse primer,

(SEQ ID NO: 2033)

5′-CCAGATCATCCTGATCGACAAG-3′;
neo-probe,

(SEQ ID NO: 2034)

5′FAM-ACATCGCATCGAGCGAGCACGTAC-TAMARA3′;

[0489] For normalization, 36B4 PCR primers and probe were used:

36B4-forward primer,

(SEQ ID NO: 2035)

5′-TCTATCATCAACGGGTACAAACGA-3′;
36B4 reverse primer,

(SEQ ID NO: 2036)

5′-CTTTTCAGCAAGTGGGAAGGTG-3′;
36B4 probe,

(SEQ ID NO: 2037)

5′VIC-CCTGGCCTfGTCTGTGGAGACGGATTA-TAMARA3′;

[0490] Western Blotting

[0491] Nuclear extracts can be prepared using a standard micro preparation technique (see for example Andrews and Faller, 1991, Nucleic Acids Research, 19, 2499). Protein extracts from supernatants are prepared, for example using TCA precipitation. An equal volume of 20% TCA is added to the cell supernatant, incubated on ice for 1 hour and pelleted by centrifugation for 5 minutes. Pellets are washed in acetone, dried and resuspended in water. Cellular protein extracts are run on a 10% Bis-Tris NuPage (nuclear extracts) or 4-12% Tris-Glycine (supernatant extracts) polyacrylamide gel and transferred onto nitro-cellulose membranes. Non-specific binding can be blocked by incubation, for example, with 5% non-fat milk for 1 hour followed by primary antibody for 16 hour at 4° C. Following washes, the secondary antibody is applied, for example (1:10,000 dilution) for 1 hour at room temperature and the signal detected with SuperSignal reagent (Pierce).

### Example 8

### Models Useful to Evaluate the Down-Regulation of HCV Gene Expression

Cell Culture

[0492] Although there have been reports of replication of HCV in cell culture (see below), these systems are difficult to reproduce and have proven unreliable. Therefore, as was the case for development of other anti-HCV therapeutics, such as interferon and ribavirin, after demonstration of safety in animal studies applicant can proceed directly into a clinical feasibility study.

[0493] Several recent reports have documented in vitro growth of HCV in human cell lines (Mizutani et al., Biochem Biophys Res Commun 1996 227(3):822-826; Tagawa et al., Journal of Gasteroenterology and Hepatology 1995 10(5):523-527; Cribier et al., Journal of General Virology 76(10):2485-2491; Seipp et al., Journal of General Virology 1997 78(10)2467-2478; lacovacci et al., Research Virology 1997 148(2):147-151; Iocavacci et al., Hepatology 1997 26(5) 1328-1337; Ito et al., Journal of General Virology 1996 77(5):1043-1054; Nakajima et al., Journal of Virology 1996 70(5):3325-3329; Mizutani et al., Journal of Virology 1996 70(10):7219-7223; Valli et al., Res Virol 1995 146(4): 285-288; Kato et al., Biochem Biophys Res Comm 1995 206(3):863-869). Replication of HCV has been reported in both T and B cell lines, as well as cell lines derived from human hepatocytes. Detection of low level replication was documented using either RT-PCR based assays or the b-DNA assay. It is important to note that the most recent publications regarding HCV cell cultures document replication for up to 6-months. However, the level of HCV replication observed in these cell lines has not been robust enough for screening of antiviral compounds.

[0494] In addition to cell lines that can be infected with HCV, several groups have reported the successful transformation of cell lines with cDNA clones of full-length or partial HCV genomes (Harada et al., Journal of General Virology, 1995, 76(5)1215-1221; Haramatsu et al., Journal of Viral Hepatitis 1997 4S(1):61-67; Dash et al., American Journal of Pathology 1997 151(2):363-373; Mizuno et al., Gasteroenterology 1995 109(6):1933-40; Yoo et al., Journal Of Virology 1995 69(1):32-38).

[0495] The recent development of subgenomic HCV RNA replicons capable of successfully replicating in the human hepatoma cell line, Huh7, represents a significant advance toward a dependable cell culture model. These replicons contain the neomycin gene upstream of the HCV nonstructural genes allowing for the selection of replicative RNAs in Huh7 cells. Initially, RNA replication was detected at a low frequency (Lohmann et al. Science 1999 285: 110-113) but the identification of replicons with cell-adaptive mutations in the NS5A region has improved the efficiency of replication 10,000-fold (Blight et al. Science 2000 290:1972-1975). Steps in the HCV life cycle, such as translation, protein processing, and RNA replication are recapitulated in the subgenomic replicon systems, but early events (viral attachment and uncoating) and viral assembly is absent. Inclusion of the structural genes of HCV within the replicons results in the production of HCV core and envelope proteins, but virus assembly does not occur (Pietschmann et al. Journal of Virology 2002 76: 4008-4021). Such replicon systems have been used to study siRNA mediated inhibition of HCV RNA, see for example, Randall et al., 2003, PNAS USA, 100, 235-240.

[0496] In several cell culture systems, cationic lipids have been shown to enhance the bioavailability of oligonucleotides to cells in culture (Bennet, et al., 1992, Mol. Pharmacology, 41, 1023-1033). In one embodiment, siNA molecules of the invention are complexed with cationic lipids for cell culture experiments. siNA and cationic lipid mixtures are prepared in serum-free DMEM immediately prior to addition to the cells. DMEM plus additives are warmed to room temperature (about 20-25° C.) and cationic lipid is added to the final desired concentration and the solution is vortexed briefly. siNA molecules are added to the final desired concentration and the solution is again vortexed briefly and incubated for 10 minutes at room temperature. In dose response experiments, the RNA/lipid complex is serially diluted into DMEM following the 10 minute incubation.

Animal Models

[0497] Evaluating the efficacy of anti-HCV agents in animal models is an important prerequisite to human clinical trials. The best characterized animal system for HCV infection is the chimpanzee. Moreover, the chronic hepatitis that results from HCV infection in chimpanzees and humans is very similar. Although clinically relevant, the chimpanzee model suffers from several practical impediments that make use of this model difficult. These include high cost, long incubation requirements and lack of sufficient quantities of animals. Due to these factors, a number of groups have attempted to develop rodent models of chronic hepatitis C infection. While direct infection has not been possible, several groups have reported on the stable transfection of either portions or entire HCV genomes into rodents (Yamamoto et al., Hepatology 1995 22(3): 847-855; Galun et al., Journal of Infectious Disease 1995 172(1):25-30; Koike et al., Journal of general Virology 1995 76(12)3031-3038; Pasquinelli et al., Hepatology 1997 25(3): 719-727; Hayashi et al., Princess Takamatsu Symp 1995 25:1430149; Mariya et al., Journal of General Virology 1997 78(7) 1527-1531; Takehara et al., Hepatology 1995 21(3):746-751; Kawamura et al., Hepatology 1997 25(4): 1014-1021). In addition, transplantation of HCV infected human liver into immunocompromised mice results in prolonged detection of HCV RNA in the animal's blood.

[0498] A method for expressing hepatitis C virus in an in vivo animal model has been developed (Vierling, International PCT Publication No. WO 99/16307). Viable, HCV infected human hepatocytes are transplanted into a liver parenchyma of a scid/scid mouse host. The scid/scid mouse host is then maintained in a viable state, whereby viable, morphologically intact human hepatocytes persist in the donor tissue and hepatitis C virus is replicated in the persisting human hepatocytes. This model provides an effective means for the study of HCV inhibition by enzymatic nucleic acids in vivo.

[0499] As such, these models can be used in evaluating the efficacy of siNA molecules of the invention in inhibiting HCV expression. These models and others can similarly be used to evaluate the safety and efficacy of siNA molecules of the invention in a pre-clinical setting.

### Example 9

### RNAi Mediated Inhibition of HCV Expression

[0500] siNA constructs (Table III) are tested for efficacy in reducing HCV RNA expression in, for example, Huh7 cells. Cells are plated approximately 24 hours before transfection in 96-well plates at 5,000-7,500 cells/well, 100 μl/well, such that at the time of transfection cells are 70-90% confluent. For transfection, annealed siNAs are mixed with the transfection reagent (Lipofectamine 2000, Invitrogen) in a volume of 50 μl/well and incubated for 20 minutes at room temperature. The siNA transfection mixtures are added to cells to give a final siNA concentration of 25 nM in a volume of 150 μl. Each siNA transfection mixture is added to 3 wells for triplicate siNA treatments. Cells are incubated at 37° for 24 hours in the continued presence of the siNA transfection mixture. At 24 hours, RNA is prepared from each well of treated cells. The supernatants with the transfection mixtures are first removed and discarded, then the cells are lysed and RNA prepared from each well. Target gene expression following treatment is evaluated by RT-PCR for the target gene and for a control gene (36B4, an RNA polymerase subunit) for normalization. The triplicate data is averaged and the standard deviations determined for each treatment. Normalized data are graphed and the percent reduction of target mRNA by active siNAs in comparison to their respective inverted control siNAs is determined.

### Example 10

### siNA Inhibition of a Chimeric HCV/Poliovirus in HeLa Cells

[0501] Inhibition of a chimeric HCV/Poliovirus was investigated using 21 nucleotide siNA duplexes in HeLa cells. Seven siNA were designed that target three regions in the highly conserved 5′ untranslated region (UTR) of HCV RNA. The siNAs were screened in two cell culture systems dependent upon the 5′-UTR of HCV; one requires translation of an HCV/luciferase gene, while the other involves replication of a chimeric HCV/poliovirus (PV) (see Blatt et al., U.S. Ser. No. 09/740,332, filed Dec. 18, 2000, incorporated by reference herein). Transfection for the HCV/PV system was performed in HeLa cells (grown in DMEM supplemented with sodium pyruvate and 100 mM HEPES with 5% FBS) using either cationic lipid NC168 or LFA2K, with an siNA concentration of 10 nM or 25 nM. HeLa cells were innoculated with HCV/PV virus at an moi=0.01 pfu/cell for 30 minutes in serum-free media. The innoculum was removed and 80 μL media was added, with 20 μL of transfection complex added to each well. The cells and supernatants were frozen at 20-24 hours post transfection. Each plate underwent 3 freeze-thaw cycles and the supernatant was collected. The supernatant was titered on HeLa cells for 3 days, then stained and counted. The results shown in FIGS. 24-27 are reported as pfu/ml×105.

[0502] Two siNAs (29579/29586 and 29578/29585, see Table III) targeting the same region (shifted by one nucleotide) are active in both systems (see FIG. 22). For example, a >85% reduction in HCVPV replication was observed in siNA-treated cells compared to an inverse siNA control 29593/29600 (FIG. 22) with an IC50=˜2.5 nM (FIG. 23). To develop nuclease-resistant siNA for in vivo applications, siNAs can be modified to contain stabilizing chemical modifications. Such modifications include phosphorothioate linkages (P═S), 2′-Omethyl nucleotides, 2′-fluoro (F) nucleotides, 2′-deoxy nucleotides, universal base nucleotides, 5′ and/or 3′ end modifications and a variety of other nucleotide and non-nucleotide modifications, such as those described herein, in one or both siNA strands. Using this systematic approach, active siNA molecules have been identified that are substantially more resistant to nucleases. Several of these constructs were tested in the HCV/poliovirus chimera system, demonstrating significant reduction in viral replication (see FIGS. 24-27). siNA constructs shown in FIGS. 24-27 are referred to by Compound numbers that are cross referenced and identified in Table III. siNA activity is compared to relevant controls (untreated cells, scrambled/inactive control sequences, or transfection controls). FIG. 24 shows the inhibition of HCV RNA in the HCV/poliovirus chimera system using chemically modified siNA construct 30051/30053, which construct has inverted deoxy abasic nucleotides at the 3′ and 5′ ends, several phosphorothioate linkages, and 5-nitroindole nucleotides. FIG. 25 shows the inhibition of HCV RNA in the HCV/poliovirus chimera system using chemically modified siNA construct 30055/30057, which construct has inverted deoxy abasic nucleotides at the 3′ and 5′ ends, several phosphorothioate linkages, and 5-nitroindole nucleotides. FIGS. 26 and 27 show the inhibition of HCV RNA in the HCV/poliovirus chimera system using unmodified siNA construct (29586/29579) and chemically modified siNA constructs 30417/30419, 30417/30420, 30418/30419, and combinations thereof at 10 nM and 25 nM siNA, respectively. As shown in FIGS. 24-27, siNA constructs of the invention provide potent inhibition of HCV RNA in the HCV/poliovirus chimera system. As such, siNA constructs, inlcuding chemically modified, nuclease resistant siNA molecules, represent an important class of therapeutic agents for treating chronic HCV infection.

### Example 11

### siNA Inhibition of HCV RNA Expression in a HCV Replicon System

[0503] A HCV replicon system was used to test the efficacy of siNAs targeting HCV RNA. The reagents are tested in cell culture using Huh7 cells (see for example Randall et al., 2003, PNAS USA, 100, 235-240) to determine the extent of RNA and protein inhibition. siNA were selected against the HCV target as described herein. RNA inhibition was measured after delivery of these reagents by a suitable transfection agent to Huh7 cells. Relative amounts of target RNA are measured versus actin using real-time PCR monitoring of amplification (eg., ABI 7700 Taqman®). A comparison is made to a mixture of oligonucleotide sequences designed to target unrelated targets or to a randomized siNA control with the same overall length and chemistry, but with randomly substituted nucleotides at each position. Primary and secondary lead reagents were chosen for the target and optimization performed. After an optimal transfection agent concentration is chosen, a RNA time-course of inhibition is performed with the lead siNA molecule. In addition, a cell-plating format can be used to determine RNA inhibition. A non-limiting example of a multiple target screen to assay siNA mediated inhibition of HCV RNA is shown in FIG. 28. siNA reagents (Table III) were transfected at 25 nM into Huh7 cells and HCV RNA quantitated compared to untreated cells (“cells” column in the figure),cells transfected with lipofectamine (“LFA2K” column in the figure) and matched chemistry inverted controls (“Inv”). As shown in the Figure, several siNA constructs show significant inhibition of HCV RNA expression in the Huh7 replicon system. Chemically modified siNA constructs were then screened as described above, with a non-limiting example of a Stab 7/8 (see Table IV) chemisty siNA construct screen shown in FIG. 30. A follow up dose response study using chemically modified siNA constructs (Stab 4/5, see Table 1) at concentrations of 5 nM, 10 nM, 25 nM and 100 nM compared to matched chemistry inverted controls is shown in FIG. 29, whereas a dose response study for Stab 7/8 constructs at concentrations of 5 nM, 10 nM, 25 nM, 50 nM and 100 nM compared to matched chemistry inverted controls is shown in FIG. 31.

### Example 12

### Effect of Interferon/siNA Combination Treatment on Replication of HCV Subgenomic Replicon in Huh7 Cells

[0504] To investigate combination use of RNAi and interferon in the inhibition of HCV replication, siNA and interferon combination treatments were assayed in the HCV Subgenomic Replicon in Huh7 cells. Huh7 cells containing the HCV subgenomic replicon Clone A were plated in 96-well plates at a density of 9,600 cells per well and incubated overnight at 37° C. The cells were then treated with interferon alone, siNAs or inverted sequence controls alone, or with interferon in combination with siNAs or inverted controls. A sub-optimal dose of interferon was used in order to observe possible potentiation of the interferon anti-viral activity in the presence of the HCV-targeted siNA. The cells were transfected with HCV targeted siNAs (31703/31707) or inverted sequence controls (31711/31715) at 5, 10, 25, 50, or 100 nM using 0.35 ul/well of Lipofectamine 2000 in media alone, or media to which was added 1.7 Units/ml of Infergen (Amgen). The cells were then incubated at 37° C. for 48 or 72 hours, at which time total RNA was isolated using an Invitek 96-well RNA isolation kit. To quantitate the levels of RNA from the HCV replicon, real-time RT-PCR was performed using probes and primers to the neomycin resistance region of the replicon. Results are shown in FIG. 32. Levels of the replicon RNA were normalized to the levels of cellular GAPDH mRNA. These data demonstrate potentiation of the effect of combination siNA/interferon treatment compared to interferon alone.

### Example 13

### Multifunctional siNA Inhibition of HCV RNA Expression in a HCV Replicon System

[0505] To investigate the use of multifunctional siNA constructs that target different sites within HCV RNA via RNAi, multifunctional siNA treatments were assayed in the HCV Subgenomic Replicon in Huh7 cells. The multifunctional siNA constructs that target either sites 304 and 327 or sites 282 and 304 of HCV RNA were compared to pools of siNA molecules that individually target site 304 and site 327 or site 282 and site 304 of HCV RNA. Huh7 cells containing the HCV subgenomic replicon Clone A were plated in 96-well plates at a density of 9,600 cells per well and incubated overnight at 37° C. The cells were then treated with the individual siNAs, pooled siNAs, multifunctional siNAs, irrelevant multifunctional siNA controls, and a transfection control (LFA only). The cells were then incubated at 37° C. for 48 or 72 hours, at which time total RNA was isolated using an Invitek 96-well RNA isolation kit. To quantitate the levels of RNA from the HCV replicon, real-time RT-PCR was performed using probes and primers to the neomycin resistance region of the replicon. Dose response results for unmodified multifunctional siNA constructs assayed at 0.1, 1.0 and 10 nM are shown in FIG. 33, whereas results for modified multifunctional siNA constructs are shown in FIGS. 34-41. Levels of the replicon RNA were normalized to the levels of cellular GAPDH mRNA. These data demonstrate that the multifunctional siNA constructs are equally effective in inhibition of HCV RNA expression by targeting multiple sites as are pools of individual siNA constructs that target each site.

### Example 14

### Multifunctional siNA Design

[0506] Once target sites have been identified for multifunctional siNA constructs, each strand of the siNA is designed with a complementary region of length, for example, between about 18 and about 28 nucleotides, that is complementary to a different target nucleic acid sequence. Each complementary region is designed with an adjacent flanking region of about 4 to about 22 nucleotides that is not complementary to the target sequence, but which comprises complementarity to the complementary region of the other sequence (see for example FIG. 16). Hairpin constructs can likewise be designed (see for example FIG. 17). Identification of complementary, palindrome or repeat sequences that are shared between the different target nucleic acid sequences can be used to shorten the overall length of the multifunctional siNA constructs (see for example FIGS. 18 and 19).

[0507] In a non-limiting example, a multifunctional siNA is designed to target two separate nucleic acid sequences. The goal is to combine two different siNAs together in one siNA that is active against two different targets. The siNAs are joined in a way that the 5′ of each strand starts with the “antisense” sequence of one of two siRNAs as shown in italics below.

SEQ ID NO: 2038

3′ TTAGAAACCAGACGUAAGUGU GGUACGACCUGACGACCGU 5′

SEQ ID NO: 2039

5′ UCUUUGGUCUGCAUUCACAC CAUGCUGGACUGCUGGCATT3′

[0508] RISC is expected to incorporate either of the two strands from the 5′ end. This would lead to two types of active RISC populations carrying either strand. The 5′ 19 nt of each strand will act as guide sequence for degradation of separate target sequences.

[0509] In another example, the size of multifunctional siNA molecules is reduced by either finding overlaps or truncating the individual siNA length. The exemplary excercise described below indicates that for any given first target sequence, a shared complementary sequence in a second target sequence is likely to be found.

[0510] The number of spontaneous matches of short polynucleotide sequences (e.g., less than 14 nucleotides) that are expected to occur between two longer sequences generated independent of one another was investigated. A simulation using the uniform random generator SAS V8.1 utilized a 4,000 character string that was generated as a random repeating occurrence of the letters {ACGU}. This sequence was then broken into the nearly 4000 overlapping sets formed by taking S1 as the characters from positions (1,2 . . . n), S2 from positions (2,3 . . . , n+1) completely through the sequence to the last set, S 4000-n+1 from position (4000-n+1, . . . , 4000). This process was then repeated for a second 4000 character string. Occurrence of same sets (of size n) were then checked for sequence identity between the two strings by a sorting and match-merging routine. This procedure was repeated for sets of 9-11 characters. Results were an average of 55 matching sequences of length n=9 characters (range 39 to 72); 13 common sets (range 6 to 18) for size n=10, and 4 matches on average (range 0 to 6) for sets of 11 characters. The choice of 4000 for the original string length is approximately the length of the coding region of both target nucleic acid molecules. This simple simulation suggests that any two long coding regions formed independent of one-another will share common short sequences that can be used to shorten the length of multifunctional siNA constructs. In this example, common sequences of size 9 occurred by chance alone in >1% frequency.

[0511] In another example, the length of a multifunctional siNA construct is reduced by determining whether fewer base pairs of sequence homology to each target sequence can be tolerated for effective RNAi activity. If so, the overall length of multifunctional siNA can be reduced as shown below. In the following hypothetical example, 4 nucleotides (bold) are reduced from each 19 nucleotide siNA ′1′and siNA ′2′ constructs. The resulting multifunctional siNA is 30 base pairs long.

Additional Multifuctional siNA Designs

[0512] Three categories of additional multifunctional siNA designs are presented that allow a single siNA molecule to silence multiple targets. The first method utilizes linkers to join siNAs (or multiunctional siNAs) in a direct manner. This can allow the most potent siNAs to be joined without creating a long, continuous stretch of RNA that has potential to trigger an interferon response. The second method is a dendrimeric extension of the overlapping or the linked multifunctional design; or alternatively the organization of siNA in a supramolecular format. The third method uses helix lengths greater than 30 base pairs. Processing of these siNAs by Dicer will reveal new, active 5′ antisense ends. Therefore, the long siNAs can target the sites defined by the original 5′ ends and those defined by the new ends that are created by Dicer processing. When used in combination with traditional multifunctional siNAs (where the sense and antisense strands each define a target) the approach can be used for example to target 4 or more sites.

I. Tethered Bifunctional siNAs

[0513] The basic idea is a novel approach to the design of multifunctional siNAs in which two antisense siNA strands are annealed to a single sense strand. The sense strand oligonucleotide contains a linker (e.g., non-nulcoetide linker as described herein) and two segments that anneal to the antisense siNA strands (see FIG. 42). The linkers can also optionally comprise nucleotide-based linkers. Several potential advantages and variations to this approach include, but are not limited to:

1. The two antisense siNAs are independent. Therefore, the choice of target sites is not constrained by a requirement for sequence conservation between two sites. Any two highly active siNAs can be combined to form a multifunctional siNA.

[0514] 2. When used in combination with target sites having homology, siNAs that target a sequence present in two genes (e.g., different HCV strains), the design can be used to target more than two sites. A single multifunctional siNA can be for example, used to target RNA of two different HCV RNAs (using one antisense strand of the multifunctional siNA targeting of conserved sequence between to the two RNAs) and a host RNA (using the second antisense strand of the multifunctional siNA targeting host RNA (e.g., La antigen or FAS) This approach allows targeting of more than one HCV strain and one or more host RNAs using a single multifunctional siNA.

3. Multifunctional siNAs that use both the sense and antisense strands to target a gene can also be incorporated into a tethered multifuctional design. This leaves open the possibility of targeting 6 4 or more sites with a single complex.

4. It can be possible to anneal more than two antisense strand siNAs to a single tethered sense strand.

5. The design avoids long continuous stretches of dsRNA. Therefore, it is less likely to initiate an interferon response.

[0515] 6. The linker (or modifications attached to it, such as conjugates described herein) can improve the pharmacokinetic properties of the complex or improve its incorporation into liposomes. Modifications introduced to the linker should not impact siNA activity to the same extent that they would if directly attached to the siNA (see for example FIGS. 48 and 49).

7. The sense strand can extend beyond the annealed antisense strands to provide additional sites for the attachment of conjugates.

8. The polarity of the complex can be switched such that both of the antisense 3′ ends are adjacent to the linker and the 5′ ends are distal to the linker or combination thereof.

Dendrimer and Supramolecular siNAs

[0516] In the dendrimer siNA approach, the synthesis of siNA is initiated by first synthesizing the dendrimer template followed by attaching various functional siNAs. Various constructs are depicted in FIG. 43. The number of functional siNAs that can be attached is only limited by the dimensions of the dendrimer used.

Supramolecular Approach to Multifunctional siNA

[0517] The supramolecular format simplifies the challenges of dendrimer synthesis. In this format, the siNA strands are synthesized by standard RNA chemistry, followed by annealing of various complementary strands. The individual strand synthesis contains an antisense sense sequence of one siNA at the 5′-end followed by a nucleic acid or synthetic linker, such as hexaethyleneglyol, which in turn is followed by sense strand of another siNA in 5′ to 3′ direction. Thus, the synthesis of siNA strands can be carried out in a standard 3′ to 5′ direction. Representative examples of trifunctional and tetrafunctional siNAs are depicted in FIG. 44. Based on a similar principle, higher functionality siNA constucts can be designed as long as efficient annealing of various strands is achieved.

Dicer enabled multifunctional siNA

[0518] Using bioinformatic analysis of multiple targets, stretches of identical sequences shared between differeing target sequences can be identified ranging from about two to about fourteen nucleotides in length. These identical regions can be designed into extended siNA helixes (e.g., >30 base pairs) such that the processing by Dicer reveals a secondary functional 5′-antisense site (see for example FIG. 45). For example, when the first 17 nucleotides of a siNA antisense strand (e.g., 21 nucleotide strands in a duplex with 3′-TT overhangs) are complementary to a target RNA, robust silencing was observed at 25 nM. 80% silencing was observed with only 16 nucleotide complementarity in the same format (see FIG. 47).

[0519] Incorporation of this property into the designs of siNAs of about 30 to 40 or more base pairs results in additional multifunctional siNA constructs. The example in FIG. 45 illustrates how a 30 base-pair duplex can target three distinct sequences after processing by Dicer-RNaseIII; these sequences can be on the same mRNA or separate RNAs, such as viral and host factor messages, or multiple points along a given pathway (e.g., inflammatory cascades). Furthermore, a 40 base-pair duplex can combine a bifunctional design in tandem, to provide a single duplex targeting four target sequences. An even more extensive approach can include use of homologous sequences (e.g. VEGFR-1/VEGFR-2) to enable five or six targets silenced for one multifunctional duplex. The example in FIG. 45 demonstrates how this can be achieved. A 30 base pair duplex is cleaved by Dicer into 22 and 8 base pair products from either end (8 b.p. fragments not shown). For ease of presentation the overhangs generated by dicer are not shown—but can be compensated for. Three targeting sequences are shown. The required sequence identity overlapped is indicated by grey boxes. The N's of the parent 30 b.p. siNA are suggested sites of 2′-OH positions to enable Dicer cleavage if this is tested in stabilized chemistries. Note that processing of a 30mer duplex by Dicer RNase III does not give a precise 22+8 cleavage, but rather produces a series of closely related products (with 22+8 being the primary site). Therefore, processing by Dicer will yield a series of active siNAs. Another non-limiting example is shown in FIG. 46. A 40 base pair duplex is cleaved by Dicer into 20 base pair products from either end. For ease of presentation the overhangs generated by dicer are not shown—but can be compensated for. Four targeting sequences are shown in four colors, blue, light-blue and red and orange. The required sequence identity overlapped is indicated by grey boxes. This design format can be extended to larger RNAs. If chemically stabilized siNAs are bound by Dicer, then strategically located ribonucleotide linkages can enable designer cleavage products that permit our more extensive repertoire of multiifunctional designs. For example cleavage products not limited to the Dicer standard of approximately 22-nucleotides can allow multifunctional siNA constructs with a target sequence identity overlap ranging from, for example, about 3 to about 15 nucleotides.

[0520] Another important aspect of this approach is its ability to restrict escape mutants. Processing to reveal an internal target site can ensure that escape mutations complementary to the eight nucleotides at the antisense 5′ end will not reduce siNA effectiveness. If about 17 nucleotidest of complementarity are required for RISC-mediated target cleavage, this will restrict, for example 8/17 or 47% of potential escape mutants.

### Example 15

### Indications

[0521] The present body of knowledge in HCV research indicates the need for methods to assay HCV activity and for compounds that can regulate HCV expression for research, diagnostic, and therapeutic use. As described herein, the nucleic acid molecules of the present invention can be used in assays to diagnose disease state related of HCV levels. In addition, the nucleic acid molecules can be used to treat disease state related to HCV levels.

[0522] Particular degenerative and disease states that can be associated with HCV expression modulation include, but are not limited to, HCV infection, liver failure, hepatocellular carcinoma, cirrhosis, and/or other disease states associated with HCV infection.

### Example 16

### Interferons

[0523] Interferons represent a non-limiting example of a class of compounds that can be used in conjuction with the siNA molecules of the invention for treating the diseases and/or conditions described herein. Type I interferons (IFN) are a class of natural cytokines that includes a family of greater than 25 IFN-α (Pesta, 1986, Methods Enzymol. 119, 3-14) as well as IFN-β, and IFN-co. Although evolutionarily derived from the same gene (Diaz et al., 1994, Genomics 22, 540-552), there are many differences in the primary sequence of these molecules, implying an evolutionary divergence in biologic activity. All type I IFN share a common pattern of biologic effects that begin with binding of the IFN to the cell surface receptor (Pfeffer & Strulovici, 1992, Transmembrane secondary messengers for IFN-α/β. In: Interferon. Principles and Medical Applications., S. Baron, D. H. Coopenhaver, F. Dianzani, W. R. Fleischmann Jr., T. K. Hughes Jr., G. R. Kimpel, D. W. Niesel, G. J. Stanton, and S. K. Tyring, eds. 151-160). Binding is followed by activation of tyrosine kinases, including the Janus tyrosine kinases and the STAT proteins, which leads to the production of several IFN-stimulated gene products (Johnson et al., 1994, Sci. Am. 270, 68-75). The IFN-stimulated gene products are responsible for the pleotropic biologic effects of type I IFN, including antiviral, antiproliferative, and immunomodulatory effects, cytokine induction, and HLA class I and class II regulation (Pestka et al., 1987, Annu. Rev. Biochem 56, 727). Examples of IFN-stimulated gene products include 2-5-oligoadenylate synthetase (2-5 OAS), β₂-microglobulin, neopterin, p68 kinases, and the Mx protein (Chebath & Revel, 1992, The 2-5 A system: 2-5 A synthetase, isospecies and functions. In: Interferon. Principles and Medical Applications, S. Baron, D. H. Coopenhaver, F. Dianzani, W. R. Jr. Fleischmann, T. K. Jr Hughes, G. R. Kimpel, D. W. Niesel, G. J. Stanton, and S. K. Tyring, eds., pp. 225-236; Samuel, 1992, The RNA-dependent P1/eIF-2α protein kinase. In: Interferon. Principles and Medical Applications. S. Baron, D. H. Coopenhaver, F. Dianzani, W. R. Fleischmann Jr., T. K. Hughes Jr., G. R. Kimpel, D. W. Niesel, G. H. Stanton, and S. K. Tyring, eds. 237-250; Horisberger, 1992, MX protein: function and Mechanism of Action. In: Interferon. Principles and Medical Applications. S. Baron, D. H. Coopenhaver, F. Dianzani, W. R. Fleischmann Jr., T. K. Hughes Jr., G. R. Kimpel, D. W. Niesel, G. H. Stanton, and S. K. Tyring, eds. 215-224). Although all type I IFN have similar biologic effects, not all the activities are shared by each type I IFN, and in many cases, the extent of activity varies quite substantially for each IFN subtype (Fish et al, 1989, J Interferon Res. 9, 97-114; Ozes et al., 1992, J Interferon Res. 12, 55-59). More specifically, investigations into the properties of different subtypes of IFN-α and molecular hybrids of IFN-α have shown differences in pharmacologic properties (Rubinstein, 1987, J Interferon Res. 7, 545-551). These pharmacologic differences can arise from as few as three amino acid residue changes (Lee et al., 1982, Cancer Res. 42, 1312-1316).

[0524] Eighty-five to 166 amino acids are conserved in the known IFN-α subtypes. Excluding the IFN-α pseudogenes, there are approximately 25 known distinct IFN-α subtypes. Pairwise comparisons of these nonallelic subtypes show primary sequence differences ranging from 2% to 23%. In addition to the naturally occurring IFNs, a non-natural recombinant type I interferon known as consensus interferon (CIFN) has been synthesized as a therapeutic compound (Tong et al., 1997, Hepatology 26, 747-754).

[0525] Interferon is currently in use for at least 12 different indications, including infectious and autoimmune diseases and cancer (Borden, 1992, N. Engl. J. Med. 326, 1491-1492). For autoimmune diseases, IFN has been utilized for treatment of rheumatoid arthritis, multiple sclerosis, and Crohn's disease. For treatment of cancer, IFN has been used alone or in combination with a number of different compounds. Specific types of cancers for which IFN has been used include squamous cell carcinomas, melanomas, hypemephromas, hemangiomas, hairy cell leukemia, and Kaposi's sarcoma. In the treatment of infectious diseases, IFNs increase the phagocytic activity of macrophages and cytotoxicity of lymphocytes and inhibits the propagation of cellular pathogens. Specific indications for which IFN has been used as treatment include hepatitis B, human papillomavirus types 6 and 11 (i.e. genital warts) (Leventhal et al., 1991, N Engl J Med 325, 613-617), chronic granulomatous disease, and hepatitis C virus.

[0526] Numerous well controlled clinical trials using IFN-alpha in the treatment of chronic HCV infection have demonstrated that treatment three times a week results in lowering of serum ALT values in approximately 50% (range 40% to 70%) of patients by the end of 6 months of therapy (Davis et al., 1989, N. Engl. J. Med. 321, 1501-1506; Marcellin et al., 1991, Hepatology 13, 393-397; Tong et al., 1997, Hepatology 26, 747-754; Tong et al., Hepatology 26, 1640-1645). However, following cessation of interferon treatment, approximately 50% of the responding patients relapsed, resulting in a “durable” response rate as assessed by normalization of serum ALT concentrations of approximately 20 to 25%. In addition, studies that have examined six months of type 1 interferon therapy using changes in HCV RNA values as a clinical endpoint have demonstrated that up to 35% of patients will have a loss of HCV RNA by the end of therapy (Tong et al., 1997, supra). However, as with the ALT endpoint, about 50% of the patients relapse six months following cessation of therapy resulting in a durable virologic response of only 12% (23). Studies that have examined 48 weeks of therapy have demonstrated that the sustained virological response is up to 25%.

[0527] Pegylated interferons, i.e., interferons conjugated with polyethylene glycol (PEG), have demonstrated improved characteristics over interferon. Advantages incurred by PEG conjugation can include an improved pharmacokinetic profile compared to interferons lacking PEG, thus imparting more convenient dosing regimes, improved tolerance, and improved antiviral efficacy. Such improvements have been demonstrated in clinical studies of both polyethylene glycol interferon alfa-2a (PEGASYS, Roche) and polyethylene glycol interferon alfa-2b (VIRAFERON PEG, PEG-INTRON, Enzon/Schering Plough).

[0528] siNA molecules in combination with interferons and polyethylene glycol interferons have the potential to improve the effectiveness of treatment of HCV or any of the other indications discussed above. siNA molecules targeting RNAs associated with HCV infection can be used individually or in combination with other therapies such as interferons and polyethylene glycol interferons and to achieve enhanced efficacy.

### Example 17

### Diagnostic Uses

[0529] The siNA molecules of the invention can be used in a variety of diagnostic applications, such as in the identification of molecular targets (e.g., RNA) in a variety of applications, for example, in clinical, industrial, environmental, agricultural and/or research settings. Such diagnostic use of siNA molecules involves utilizing reconstituted RNAi systems, for example, using cellular lysates or partially purified cellular lysates. siNA molecules of this invention can be used as diagnostic tools to examine genetic drift and mutations within diseased cells or to detect the presence of endogenous or exogenous, for example viral, RNA in a cell. The close relationship between siNA activity and the structure of the target RNA allows the detection of mutations in any region of the molecule, which alters the base-pairing and three-dimensional structure of the target RNA. By using multiple siNA molecules described in this invention, one can map nucleotide changes, which are important to RNA structure and function in vitro, as well as in cells and tissues. Cleavage of target RNAs with siNA molecules can be used to inhibit gene expression and define the role of specified gene products in the progression of disease or infection. In this manner, other genetic targets can be defined as important mediators of the disease. These experiments will lead to better treatment of the disease progression by affording the possibility of combination therapies (e.g., multiple siNA molecules targeted to different genes, siNA molecules coupled with known small molecule inhibitors, or intermittent treatment with combinations siNA molecules and/or other chemical or biological molecules). Other in vitro uses of siNA molecules of this invention are well known in the art, and include detection of the presence of mRNAs associated with a disease, infection, or related condition. Such RNA is detected by determining the presence of a cleavage product after treatment with a siNA using standard methodologies, for example, fluorescence resonance emission transfer (FRET).

[0530] In a specific example, siNA molecules that cleave only wild-type or mutant forms of the target RNA are used for the assay. The first siNA molecules (i.e., those that cleave only wild-type forms of target RNA) are used to identify wild-type RNA present in the sample and the second siNA molecules (i.e., those that cleave only mutant forms of target RNA) are used to identify mutant RNA in the sample. As reaction controls, synthetic substrates of both wild-type and mutant RNA are cleaved by both siNA molecules to demonstrate the relative siNA efficiencies in the reactions and the absence of cleavage of the “non-targeted” RNA species. The cleavage products from the synthetic substrates also serve to generate size markers for the analysis of wild-type and mutant RNAs in the sample population. Thus, each analysis requires two siNA molecules, two substrates and one unknown sample, which is combined into six reactions. The presence of cleavage products is determined using an RNase protection assay so that full-length and cleavage fragments of each RNA can be analyzed in one lane of a polyacrylamide gel. It is not absolutely required to quantify the results to gain insight into the expression of mutant RNAs and putative risk of the desired phenotypic changes in target cells. The expression of mRNA whose protein product is implicated in the development of the phenotype (i.e., disease related or infection related) is adequate to establish risk. If probes of comparable specific activity are used for both transcripts, then a qualitative comparison of RNA levels is adequate and decreases the cost of the initial diagnosis. Higher mutant form to wild-type ratios are correlated with higher risk whether RNA levels are compared qualitatively or quantitatively.

[0531] All patents and publications mentioned in the specification are indicative of the levels of skill of those skilled in the art to which the invention pertains. All references cited in this disclosure are incorporated by reference to the same extent as if each reference had been incorporated by reference in its entirety individually.

[0532] One skilled in the art would readily appreciate that the present invention is well adapted to carry out the objects and obtain the ends and advantages mentioned, as well as those inherent therein. The methods and compositions described herein as presently representative of preferred embodiments are exemplary and are not intended as limitations on the scope of the invention. Changes therein and other uses will occur to those skilled in the art, which are encompassed within the spirit of the invention, are defined by the scope of the claims.

[0533] It will be readily apparent to one skilled in the art that varying substitutions and modifications can be made to the invention disclosed herein without departing from the scope and spirit of the invention. Thus, such additional embodiments are within the scope of the present invention and the following claims. The present invention teaches one skilled in the art to test various combinations and/or substitutions of chemical modifications described herein toward generating nucleic acid constructs with improved activity for mediating RNAi activity. Such improved activity can comprise improved stability, improved bioavailability, and/or improved activation of cellular responses mediating RNAi. Therefore, the specific embodiments described herein are not limiting and one skilled in the art can readily appreciate that specific combinations of the modifications described herein can be tested without undue experimentation toward identifying siNA molecules with improved RNAi activity.

[0534] The invention illustratively described herein suitably can be practiced in the absence of any element or elements, limitation or limitations that are not specifically disclosed herein. Thus, for example, in each instance herein any of the terms “comprising”, “consisting essentially of”, and “consisting of” may be replaced with either of the other two terms. The terms and expressions which have been employed are used as terms of description and not of limitation, and there is no intention that in the use of such terms and expressions of excluding any equivalents of the features shown and described or portions thereof, but it is recognized that various modifications are possible within the scope of the invention claimed. Thus, it should be understood that although the present invention has been specifically disclosed by preferred embodiments, optional features, modification and variation of the concepts herein disclosed may be resorted to by those skilled in the art, and that such modifications and variations are considered to be within the scope of this invention as defined by the description and the appended claims.

[0535] In addition, where features or aspects of the invention are described in terms of Markush groups or other grouping of alternatives, those skilled in the art will recognize that the invention is also thereby described in terms of any individual member or subgroup of members of the Markush group or other group.

TABLE I
HCV Accession Numbers

| Seq Name | Acc# | LOCUS |
|---|---|---|
| gi\|329763\|gb\|M84754.1\|HPCGENANTI | M84754.1 | HPCGENANTI |
| gi\|567059\|gb\|U16362.1\|HCU16362 | U16362.1 | HCU16362 |
| gi\|5918956\|gb\|AF165059.1\|AF165059 | AF165059.1 | AF165059 |
| gi\|385583\|gb\|S62220.1\|S62220 | S62220.1 | S62220 |
| gi\|6010587\|gb\|AF177040.1\|AF177040 | AF177040.1 | AF177040 |
| gi\|5748510\|emb\|AJ238800.1\| | AJ238800.1 | HCJ238800 |
| HCJ238800 | | |
| gi\|7650221\|gb\|AF207752.1\|AF207752 | AF207752.1 | AF207752 |
| gi\|11559454\|dbj\|AB049094.1\| | AB049094.1 | AB049094 |
| AB049094 | | |
| gi\|3550760\|dbj\|D84263.1\|D84263 | D84263.1 | D84263 |
| gi\|221610\|dbj\|D90208.1\|HPCJCG | D90208.1 | HPCJCG |
| gi\|558520\|dbj\|D28917.1\|HPCK3A | D28917.1 | HPCK3A |
| gi\|2176577\|dbj\|E08461.1\|E08461 | E08461.1 | E08461 |
| gi\|6707285\|gb\|AF169005.1\|AF169005 | AF169005.1 | AF169005 |
| gi\|12309923\|emb\|AX057094.1\| | AX057094.1 | AX057094 |
| AX057094 | | |
| gi\|6010585\|gb\|AF177039.1\|AF177039 | AF177039.1 | AF177039 |
| gi\|7329202\|gb\|AF238482.1\|AF238482 | AF238482.1 | AF238482 |
| gi\|11559464\|dbj\|AB049099.1\| | AB049099.1 | AB049099 |
| AB049099 | | |
| gi\|5918932\|gb\|AF165047.1\|AF165047 | AF165047.1 | AF165047 |
| gi\|5918946\|gb\|AF165054.1\|AF165054 | AF165054.1 | AF165054 |
| gi\|7650233\|gb\|AF207758.1\|AF207758 | AF207758.1 | AF207758 |
| gi\|19568932\|gb\|AF483269.1\| | AF483269.1 | |
| gi\|7650247\|gb\|AF207765.1\|AF207765 | AF207765.1 | AF207765 |
| gi\|12309919\|emb\|AX057086.1\| | AX057086.1 | AX057086 |
| AX057086 | | |
| gi\|5708597\|dbj\|E10839.1\|E10839 | E10839.1 | E10839 |
| gi\|2327074\|gb\|AF011753.1\|AF011753 | AF011753.1 | AF011753 |
| gi\|12310062\|emb\|AX057317.1\| | AX057317.1 | AX057317 |
| AX057317 | | |
| gi\|221606\|dbj\|D10750.1\|HPCJ491 | D10750.1 | HPCJ491 |
| gi\|2174448\|dbj\|E06261.1\|E06261 | E06261.1 | E06261 |
| gi\|3098640\|gb\|AF054251.1\|AF054251 | AF054251.1 | AF054251 |
| gi\|18027684\|gb\|AF313916.1\|AF313916 | AF313916.1 | AF313916 |
| gi\|329873\|gb\|M62321.1\|HPCPLYPRE | M62321.1 | HPCPLYPRE |
| gi\|464177\|dbj\|D14853.1\|HPCCGS | D14853.1 | HPCCGS |
| gi\|15422182\|gb\|AY051292.1\| | AY051292.1 | |
| gi\|676877\|dbj\|D49374.1\|HPCFG | D49374.1 | HPCFG |
| gi\|1030706\|dbj\|D50480.1\|HPCK1R1 | D50480.1 | HPCK1R1 |
| gi\|7650223\|gb\|AF207753.1\|AF207753 | AF207753.1 | AF207753 |
| gi\|7650237\|gb\|AF207760.1\|AF207760 | AF207760.1 | AF207760 |
| gi\|11559444\|dbj\|AB049089.1\| | AB049089.1 | AB049089 |
| AB049089 | | |
| gi\|3550762\|dbj\|D84264.1\|D84264 | D84264.1 | D84264 |
| gi\|12831192\|gb\|AF333324.1\|AF333324 | AF333324.1 | AF333324 |
| gi\|13122265\|dbj\|AB047641.1\| | AB04764 1.1 | AB047641 |
| AB047641 | | |
| gi\|7329204\|gb\|AF238483.1\|AF238483 | AF238483.1 | AF238483 |
| gi\|11559468\|dbj\|AB049101.1\| | AB049101.1 | AB049101 |
| AB049101 | | |
| gi\|5918934\|gb\|AF165048.1\|AF165048 | AF165048.1 | AF165048 |
| gi\|5918948\|gb\|AF165055.1\|AF165055 | AF165055.1 | AF165055 |
| gi\|7650235\|gb\|AF207759.1\|AF207759 | AF207759.1 | AF207759 |
| gi\|7650249\|gb\|AF207766.1\|AF207766 | AF207766.1 | AF207766 |
| gi\|9843676\|emb\|AJ278830.1\| | AJ278830.1 | HEC278830 |
| HEC278830 | | |
| gi\|11559450\|dbj\|AB049092.1\| | AB049092.1 | AB049092 |
| AB049092 | | |
| gi\|2943783\|dbj\|D89815.1 D89815 | D89815.1 | D89815 |
| gi\|9626438\|ref\|NC_001433.1\| | NC_001433.1 | |
| gi\|12310134\|emb\|AX057395.1\| | AX057395.1 | AX057395 |
| AX057395 | | |
| gi\|11559460\|dbj\|AB049097.1\| | AB049097.1 | AB049097 |
| AB049097 | | |
| gi\|12309922\|emb\|AX057092.1\| | AX057092.1 | AX057092 |
| AX057092 | | |
| gi\|2174644\|dbj\|E06457.1\|E06457 | E06457.1 | E06457 |
| gi\|2176559\|dbj\|E08443.1\|E08443 | E08443.1 | E08443 |
| gi\|5918960\|gb\|AF165061.1\|AF165061 | AF165061.1 | AF165061 |
| gi\|2326454\|emb\|Y12083.1\|HCV12083 | Y12083.1 | HCV12083 |
| gi\|5918938\|gb\|AF165050.1\|AF165050 | AF165050.1 | AF165050 |
| gi\|7650225\|gb\|AF207754.1\|AF207754 | AF207754.1 | AF207754 |
| gi\|7650261\|gb\|AF207772.1\|AF207772 | AF207772.1 | AF207772 |
| gi\|1030704\|dbj\|D50485.1\|HPCK1S2 | D50485.1 | HPCK1S2 |
| gi\|3550758\|dbj\|D84262.1\|D84262 | D84262.1 | D84262 |
| gi\|7650239\|gb\|AF207761.1\|AF207761 | AF207761.1 | AF207761 |
| gi\|3550764\|dbj\|D84265.1\|D84265 | D84265.1 | D84265 |
| gi\|7329206\|gb\|AF238484.1\|AF238484 | AF238484.1 | AF238484 |
| gi\|2176516\|dbj\|E08399.1\|E08399 | E08399.1 | E08399 |
| gi\|5918936\|gb\|AF165049.1\|AF165049 | AF165049.1 | AF165049 |
| gi\|11559446\|dbj\|AB049090.1\| | AB049090.1 | AB049090 |
| AB049090 | | |
| gi\|5441837\|emb\|AJ242653.1\| | AJ242653.1 | SSE242653 |
| SSE242653 | | |
| gi\|3098641\|gb\|AF054252.1\| | AF054252.1 | AF054252 |
| AF054252 | | |
| gi\|4753720\|emb\|AJ132997.1\| | AJ132997.1 | HCV132997 |
| HCV132997 | | |
| gi\|5420376\|emb\|AJ238799.1\| | AJ238799.1 | HCJ238799 |
| HCJ238799 | | |
| gi\|11559440\|dbj\|AB049087.1\| | AB049087.1 | AB049087 |
| AB049087 | | |
| gi\|15529110\|gb\|AY045702.1\| | AY045702.1 | |
| gi\|560788\|dbj\|D30613.1\|HPCPP | D30613.1 | HPCPP |
| gi\|11225869\|emb\|AX036253.1\| | AX036253.1 | AX036253 |
| AX036253 | | |
| gi\|11559456\|dbj\|AB049095.1\| | AB049095.1 | AB049095 |
| AB049095 | | |
| gi\|329770\|gb\|M58335.1\|HPCHUMR | M58335.1 | HPCHUMR |
| gi\|6707279\|gb\|AF169002.1\|AF169002 | AF169002.1 | AF169002 |
| gi\|221586\|dbj\|D10749.1\|HPCHCJ1 | D10749.1 | HPCHCJ1 |
| gi\|2171981\|dbj\|E03766.1\|E03766 | E03766.1 | E03766 |
| gi\|6010579\|gb\|AF177036.1\|AF177036 | AF177036.1 | AF177036 |
| gi\|1030703\|dbj\|D50484.1\|HPCK1S3 | D50484.1 | HPCK1S3 |
| gi\|3098650\|gb\|AF054257.1\|AF054257 | AF054257.1 | AF054257 |
| gi\|5821154\|dbj\|AB016785.1\|AB016785 | AB016785.1 | AB016785 |
| gi\|5918962\|gb\|AF165062.1\|AF165062 | AF165062.1 | AF165062 |
| gi\|7650227\|gb\|AF207755.1\|AF207755 | AF207755.1 | AF207755 |
| gi\|7650263\|gb\|AF207773.1\|AF207773 | AF207773.1 | AF207773 |
| gi\|1183030\|dbj\|D63822.1\|HPCJK046E2 | D63822.1 | HPCJK046E2 |
| gi\|13122271\|dbj\|AB047644.1\| | AB047644.1 | AB047644 |
| AB047644 | | |
| gi\|2443428\|gb\|U89019.1\|HCU89019 | U89019.1 | HCU89019 |
| gi\|2462303\|emb\|Y13184.1\|HCV1480 | Y13184.1 | HCV1480 |
| gi\|7329208\|gb\|AF238485.1\|AF238485 | AF238485.1 | AF238485 |
| gi\|1160327\|dbj\|D14484.1\|HPCJRNA | D14484.1 | HPCJRNA |
| gi\|12309921\|emb\|AX057090.1\| | AX057090.1 | AX057090 |
| AX057090 | | |
| gi\|3098643\|gb\|AF054253.1\|AF054253 | AF054253.1 | AF054253 |
| gi\|21397075\|gb\|AF511948.1\| | AF511948.1 | |
| gi\|1030701\|dbj\|D50482.1\|HPCK1R3 | D50482.1 | HPCK1R3 |
| gi\|1030702\|dbj\|D50483.1\|HPCK1S1 | D50483.1 | HPCK1S1 |
| gi\|3098632\|gb\|AF054247.1\|AF054247 | AF054247.1 | AF054247 |
| gi\|59478\|emb\|X61596.1\|HCVJK1G | X61596.1 | HCVJK1G |
| gi\|3098652\|gb\|AF054258.1\|AF054258 | AF054258.1 | AF054258 |
| gi\|5918950\|gb\|AF165056.1\|AF165056 | AF165056.1 | AF165056 |
| gi\|7650251\|gb\|AF207767.1\|AF207767 | AF207767.1 | AF207767 |
| gi\|5918964\|gb\|AF165063.1\|AF165063 | AF165063.1 | AF165063 |
| gi\|5918928\|gb\|AF165045.1\|AF165045 | AF165045.1 | AF165045 |
| gi\|5532421\|gb\|AF139594.1\|AF139594 | AF139594.1 | AF139594 |
| gi\|13122267\|dbj\|AB047642.1\| | AB047642.1 | AB047642 |
| AB047642 | | |
| gi\|5441831\|emb\|AJ242651.1\| | AJ242651.1 | SSE242651 |
| SSE242651 | | |
| gi\|7650265\|gb\|AF207774.1\|AF207774 | AF207774.1 | AF207774 |
| gi\|7650229\|gb\|AF207756.1\|AF207756 | AF207756.1 | AF207756 |
| gi\|1183032\|dbj\|D63821.1\|HPCJK049E1 | D63821.1 | HPCJK049E1 |
| gi\|2175714\|dbj\|E07579.1\|E07579 | E07579.1 | E07579 |
| gi\|1212741\|dbj\|D45172.1\|HPCHCPO | D45172.1 | HPCHCPO |
| gi\|5708511\|dbj\|E05027.1\|E05027 | E05027.1 | E05027 |
| gi\|1483141\|dbj\|D50409.1\|D50409 | D50409.1 | D50409 |
| gi\|13122261\|dbj\|AB047639.1\| | AB047639.1 | AB047639 |
| AB047639 | | |
| gi\|6521008\|dbj\|AB031663.1\|AB031663 | AB031663.1 | AB031663 |
| gi\|633201\|emb\|X76918.1\|HCVCENS1 | X76918.1 | HCVCENS1 |
| gi\|329737\|gb\|M67463.1\|HPCCGAA | M67463.1 | HPCCGAA |
| gi\|11559452\|dbj\|AB049093.1\| | AB049093.1 | AB049093 |
| AB049093 | | |
| gi\|13619567\|emb\|AX100563.1\| | AX100563.1 | AX100563 |
| AX100563 | | |
| gi\|221604\|dbj\|D13558.1\|HPCJ483 | D13558.1 | HPCJ483 |
| gi\|11225872\|emb\|AX036256.1\| | AX036256.1 | AX036256 |
| AX036256 | | |
| gi\|1749761\|dbj\|D89872.1\|D89872 | D89872.1 | D89872 |
| gi\|5918940\|gb\|AF165051.1\|AF165051 | AF165051.1 | AF165051 |
| gi\|4753718\|emb\|AJ132996.1\| | AJ132996.1 | HCV132996 |
| HCV132996 | | |
| gi\|7650241\|gb\|AF207762.1\|AF207762 | AF207762.1 | AF207762 |
| gi\|3098645\|gb\|AF054254.1\|AF054254 | AF054254.1 | AF054254 |
| gi\|9930556\|gb\|AF290978.1\|AF290978 | AF290978.1 | AF290978 |
| gi\|11559462\|dbj\|AB049098.1\| | AB049098.1 | AB049098 |
| AB049098 | | |
| gi\|2764397\|emb\|AJ000009.1\| | AJ000009.1 | HCVPOLYP |
| HCVPOLYP | | |
| gi\|221608\|dbj\|D10988.1\|HPCJ8G | D10988.1 | HPCJ8G |
| gi\|3098634\|gb\|AF054248.1\|AF054248 | AF054248.1 | AF054248 |
| gi\|221650\|dbj\|D00944.1\|HPCPOLP | D00944.1 | HPCPOLP |
| gi\|306286\|gb\|M96362.1\|HPCUNKCDS | M96362.1 | HPCUNKCDS |
| gi\|3098654\|gb\|AF054259.1\|AF054259 | AF054259.1 | AF054259 |
| gi\|5918952\|gb\|AF165057.1\|AF165057 | AF165057.1 | AF165057 |
| gi\|7650253\|gb\|AF207768.1\|AF207768 | AF207768.1 | AF207768 |
| gi\|5918966\|gb\|AF165064.1\|AF165064 | AF165064.1 | AF165064 |
| gi\|15487693\|gb\|AF356827.1\|AF356827 | AF356827.1 | AF356827 |
| gi\|5738246\|gb\|AF176573.1\|AF176573 | AF176573.1 | AF176573 |
| gi\|11559448\|dbj\|AB049091.1\| | AB049091.1 | AB049091 |
| AB049091 | | |
| gi\|21397077\|gb\|AF511950.1\| | AF511950.1 | |
| gi\|3098638\|gb\|AF054250.1\|AF054250 | AF054250.1 | AF054250 |
| gi\|6707281\|gb\|AF169003.1\|AF169003 | AF169003.1 | AF169003 |
| gi\|329739\|gb\|L02836.1\|HPCCGENOM | L02836.1 | HPCCGENOM |
| gi\|6010581\|gb\|AF177037.1\|AF177037 | AF177037.1 | AF177037 |
| gi\|11559442\|dbj\|AB049088.1\| | AB049088.1 | AB049088 |
| AB049088 | | |
| gi\|21397076\|gb\|AF511949.1\| | AF511949.1 | |
| gi\|1030705\|dbj\|D50481.1\|HPCK1R2 | D50481.1 | HPCK1R2 |
| gi\|2176384\|dbj\|E08264.1\|E08264 | E08264.1 | E08264 |
| gi\|3660725\|gb\|AF064490.1\|AF064490 | AF064490.1 | AF064490 |
| gi\|2252489\|emb\|Y11604.1\| | Y11604.1 | HCV4APOLY |
| HCV4APOLY | | |
| gi\|5918942\|gb\|AF165052.1\|AF165052 | AF165052.1 | AF165052 |
| gi\|2895898\|gb\|AF046866.1\|AF046866 | AF046866.1 | AF046866 |
| gi\|7650243\|gb\|AF207763.1\|AF207763 | AF207763.1 | AF207763 |
| gi\|11559458\|dbj\|AB049096.1\| | AB049096.1 | AB049096 |
| AB049096 | | |
| gi\|3122263\|dbj\|AB047640.1\|AB047640 | AB047640.1 | AB047640 |
| gi\|5708574\|dbj\|E08263.1\|E08263 | E08263.1 | E08263 |
| gi\|7650257\|gb\|AF207770.1\|AF207770 | AF207770.1 | AF207770 |
| gi\|3098647\|gb\|AF054255.1\|AF054255 | AF054255.1 | AF054255 |
| gi\|11559466\|dbj\|AB049100.1\| | AB049100.1 | AB049100 |
| AB049100 | | |
| gi\|1181831\|gb\|U45476.1\|HCU45476 | U45476.1 | HCU45476 |
| gi\|2327070\|gb\|AF011751.1\|AF011751 | AF011751.1 | AF011751 |
| gi\|3098636\|gb\|AF054249.1\|AF054249 | AF054249.1 | AF054249 |
| gi\|7329210\|gb\|AF238486.1\|AF238486 | AF238486.1 | AF238486 |
| gi\|221612\|dbj\|D11168.1\|HPCJTA | D11168.1 | HPCJTA |
| gi\|960359\|dbj\|D63857.1\|HPVHCVN | D63857.1 | HPVHCVN |
| gi\|13122273\|dbj\|AB047645.1\| | AB047645.1 | AB047645 |
| AB047645 | | |
| gi\|5918954\|gb\|AF165058.1\|AF165058 | AF165058.1 | AF165058 |
| gi\|7650255\|gb\|AF207769.1\|AF207769 | AF207769.1 | AF207769 |
| gi\|437107\|gb\|U01214.1\|HCU01214 | U01214.1 | HCU01214 |
| gi\|471116\|dbj\|D10934.1\|HPCRNA | D10934.1 | HPCRNA |
| gi\|13026028\|dbj\|E66593.1 \|E66593 | E66593.1 | E66593 |
| gi\|2316097\|gb\|AF009606.1\|AF009606 | AF009606.1 | AF009606 |
| gi\|6707283\|gb\|AF169004.1\|AF169004 | AF169004.1 | AF169004 |
| gi\|514395\|dbj\|D17763.1\|HPCEGS | D17763.1 | HPCEGS |
| gi\|9757541\|dbj\|AB030907.1\|AB030907 | AB030907.1 | AB030907 |
| gi\|7329200\|gb\|AF238481.1\|AF238481 | AF238481.1 | AF238481 |
| gi\|6010583\|gb\|AF177038.1\|AF177038 | AF177038.1 | AF177038 |
| gi\|2172621\|dbj\|E04420.1\|E04420 | E04420.1 | E04420 |
| gi\|8926244\|gb\|AF271632.1\|AF271632 | AF271632.1 | AF271632 |
| gi\|5918930\|gb\|AF165046.1\|AF165046 | AF165046.1 | AF165046 |
| gi\|7650231\|gb\|AF207757.1\|AF207757 | AF207757.1 | AF207757 |
| gi\|5918944\|gb\|AF165053.1\|AF165053 | AF165053.1 | AF165053 |
| gi\|7650245\|gb\|AF207764.1\|AF207764 | AF207764.1 | AF207764 |
| gi\|12309920\|emb\|AX057088.1\| | AX057088.1 | AX057088 |
| AX057088 | | |
| gi\|5918958\|gb\|AF165060.1\|AF165060 | AF165060.1 | AF165060 |
| gi\|7650259\|gb\|AF207771.1\|AF207771 | AF207771.1 | AF207771 |
| gi\|7341102\|gb\|AF208024.1\|AF208024 | AF208024.1 | AF208024 |
| gi\|3098649\|gb\|AF054256.1\|AF054256 | AF054256.1 | AF054256 |
| gi\|1944375\|dbj\|D85516.1\|D85516 | D85516.1 | 085516 |
| gi\|2327072\|gb\|AF011752.1\|AF011752 | AF011752.1 | AF011752 |
| gi\|221614\|dbj\|D11355.1\|HPCJTB | D11355.1 | HPCJTB |
| gi\|13122269\|dbj\|AB047643.1\| | AB047643.1 | AB047643 |
| AB047643 | | |

[0536] TABLE II
HCV siNA AND TARGET SEQUENCES

| | | | | | |
|---|---|---|---|---|---|
| | Seq | | Seq | | Seq |
| Sequence | ID | Upper seq | ID | Lower seq | ID |

| GCCCCGGGAGGUCUCGUAG | 1 | GCCCCGGGAGGUCUCGUAG | 1 | CUACGAGACCUCCCGGGGC | 697 |
|---|---|---|---|---|---|
| UGUGGUACUGCCUGAUAGG | 2 | UGUGGUACUGCCUGAUAGG | 2 | CCUAUCAGGCAGUACCACA | 698 |
| UUGUGGUACUGCCUGAUAG | 3 | UUGUGGUACUGCCUGAUAG | 3 | CUAUCAGGCAGUACCACAA | 699 |
| CCCCGGGAGGUCUCGUAGA | 4 | CCCCGGGAGGUCUCGUAGA | 4 | UCUACGAGACCUCCCGGGG | 700 |
| GUGGUACUGCCUGAUAGGG | 5 | GUGGUACUGCCUGAUAGGG | 5 | CCCUAUCAGGCAGUACCAC | 701 |
| CUGCCUGAUAGGGUGCUUG | 6 | CUGCCUGAUAGGGUGCUUG | 6 | CAAGCACCCUAUCAGGCAG | 702 |
| CCUUGUGGUACUGCCUGAU | 7 | CCUUGUGGUACUGCCUGAU | 7 | AUCAGGCAGUACCACAAGG | 703 |
| GCGAAAGGCCUUGUGGUAC | 8 | GCGAAAGGCCUUGUGGUAC | 8 | GUACCACAAGGCCUUUCGC | 704 |
| UACUGCCUGAUAGGGUGCU | 9 | UACUGCCUGAUAGGGUGCU | 9 | AGCACCCUAUCAGGCAGUA | 705 |
| GGUACUGCCUGAUAGGGUG | 10 | GGUACUGCCUGAUAGGGUG | 10 | CACCCUAUCAGGCAGUACC | 706 |
| AAAGGCCUUGUGGUACUGC | 11 | AAAGGCCUUGUGGUACUGC | 11 | GCAGUACCACAAGGCCUUU | 707 |
| AAGGCCUUGUGGUACUGCC | 12 | AAGGCCUUGUGGUACUGCC | 12 | GGCAGUACCACAAGGCCUU | 708 |
| CUUGUGGUACUGCCUGAUA | 13 | CUUGUGGUACUGCCUGAUA | 13 | UAUCAGGCAGUACCACAAG | 709 |
| AGGCCUUGUGGUACUGCCU | 14 | AGGCCUUGUGGUACUGCCU | 14 | AGGCAGUACCACAAGGCCU | 710 |
| GUACUGCCUGAUAGGGUGC | 15 | GUACUGCCUGAUAGGGUGC | 15 | GCACCCUAUCAGGCAGUAC | 711 |
| ACUGCCUGAUAGGGUGCUU | 16 | ACUGCCUGAUAGGGUGCUU | 16 | AAGCACCCUAUCAGGCAGU | 712 |
| CUUGCGAGUGCCCCGGGAG | 17 | CUUGCGAGUGCCCCGGGAG | 17 | CUCCCGGGGCACUCGCAAG | 713 |
| CUGAUAGGGUGCUUGCGAG | 18 | CUGAUAGGGUGCUUGCGAG | 18 | CUCGCAAGCACCCUAUCAG | 714 |
| UUGCGAGUGCCCCGGGAGG | 19 | UUGCGAGUGCCCCGGGAGG | 19 | CCUCCCGGGGCACUCGCAA | 715 |
| CCUGAUAGGGUGCUUGCGA | 20 | CCUGAUAGGGUGCUUGCGA | 20 | UCGCAAGCACCCUAUCAGG | 716 |
| GGCCUUGUGGUACUGCCUG | 21 | GGCCUUGUGGUACUGCCUG | 21 | CAGGCAGUACCACAAGGCC | 717 |
| GCUUGCGAGUGCCCCGGGA | 22 | GCUUGCGAGUGCCCCGGGA | 22 | UCCCGGGGCACUCGCAAGC | 718 |
| UGCCUGAUAGGGUGCUUGC | 23 | UGCCUGAUAGGGUGCUUGC | 23 | GCAAGCACCCUAUCAGGCA | 719 |
| GAAAGGCCUUGUGGUACUG | 24 | GAAAGGCCUUGUGGUACUG | 24 | CAGUACCACAAGGCCUUUC | 720 |
| GCCUGAUAGGGUGCUUGCG | 25 | GCCUGAUAGGGUGCUUGCG | 25 | CGCAAGCACCCUAUCAGGC | 721 |
| CGAAAGGCCUUGUGGUACU | 26 | CGAAAGGCCUUGUGGUACU | 26 | AGUACCACAAGGCCUUUCG | 722 |
| GCCUUGUGGUACUGCCUGA | 27 | GCCUUGUGGUACUGCCUGA | 27 | UCAGGCAGUACCACAAGGC | 723 |
| GAGUGCCCCGGGAGGUCUC | 28 | GAGUGCCCCGGGAGGUCUC | 28 | GAGACCUCCCGGGGCACUC | 724 |
| CCCGGGAGGUCUCGUAGAC | 29 | CCCGGGAGGUCUCGUAGAC | 29 | GUCUACGAGACCUCCCGGG | 725 |
| UGCGAGUGCCCCGGGAGGU | 30 | UGCGAGUGCCCCGGGAGGU | 30 | ACCUCCCGGGGCACUCGCA | 726 |
| UGGUACUGCCUGAUAGGGU | 31 | UGGUACUGCCUGAUAGGGU | 31 | ACCCUAUCAGGCAGUACCA | 727 |
| CCGGUGAGUACACCGGAAU | 32 | CCGGUGAGUACACCGGAAU | 32 | AUUCCGGUGUACUCACCGG | 728 |
| GCGAGUGCCCCGGGAGGUC | 33 | GCGAGUGCCCCGGGAGGUC | 33 | GACCUCCCGGGGCACUCGC | 729 |
| CGAGUGCCCCGGGAGGUCU | 34 | CGAGUGCCCCGGGAGGUCU | 34 | AGACCUCCCGGGGCACUCG | 730 |
| UGCCCCGGGAGGUCUCGUA | 35 | UGCCCCGGGAGGUCUCGUA | 35 | UACGAGACCUCCCGGGGCA | 731 |
| GUGCCCCGGGAGGUCUCGU | 36 | GUGCCCCGGGAGGUCUCGU | 36 | ACGAGACCUCCCGGGGCAC | 732 |
| AGUGCCCCGGGAGGUCUCG | 37 | AGUGCCCCGGGAGGUCUCG | 37 | CGAGACCUCCCGGGGCACU | 733 |
| CCGGGAGGUCUCGUAGACC | 38 | CCGGGAGGUCUCGUAGACC | 38 | GGUCUACGAGACCUCCCGG | 734 |
| UGAUAGGGUGCUUGCGAGU | 39 | UGAUAGGGUGCUUGCGAGU | 39 | ACUCGCAAGCACCCUAUCA | 735 |
| GUGCUUGCGAGUGCCCCGG | 40 | GUGCUUGCGAGUGCCCCGG | 40 | CCGGGGCACUCGCAAGCAC | 736 |
| AUAGGGUGCUUGCGAGUGC | 41 | AUAGGGUGCUUGCGAGUGC | 41 | GCACUCGCAAGCACCCUAU | 737 |
| GGGUGCUUGCGAGUGCCCC | 42 | GGGUGCUUGCGAGUGCCCC | 42 | GGGGCACUCGCAAGCACCC | 738 |
| CGGGAGGUCUCGUAGACCG | 43 | CGGGAGGUCUCGUAGACCG | 43 | CGGUCUACGAGACCUCCCG | 739 |
| GGGAGGUCUCGUAGACCGU | 44 | GGGAGGUCUCGUAGACCGU | 44 | ACGGUCUACGAGACCUCCC | 740 |
| GAUAGGGUGCUUGCGAGUG | 45 | GAUAGGGUGCUUGCGAGUG | 45 | CACUCGCAAGCACCCUAUC | 741 |
| GGAGGUCUCGUAGACCGUG | 46 | GGAGGUCUCGUAGACCGUG | 46 | CACGGUCUACGAGACCUCC | 742 |
| AGGGUGCUUGCGAGUGCCC | 47 | AGGGUGCUUGCGAGUGCCC | 47 | GGGCACUCGCAAGCACCCU | 743 |
| UGCUUGCGAGUGCCCCGGG | 48 | UGCUUGCGAGUGCCCCGGG | 48 | CCCGGGGCACUCGCAAGCA | 744 |
| GGUGCUUGCGAGUGCCCCG | 49 | GGUGCUUGCGAGUGCCCCG | 49 | CGGGGCACUCGCAAGCACC | 745 |
| UAGGGUGCUUGCGAGUGCC | 50 | UAGGGUGCUUGCGAGUGCC | 50 | GGCACUCGCAAGCACCCUA | 746 |
| AGGUCUCGUAGACCGUGCA | 51 | AGGUCUCGUAGACCGUGCA | 51 | UGCACGGUCUACGAGACCU | 747 |
| GAGGUCUCGUAGACCGUGC | 52 | GAGGUCUCGUAGACCGUGC | 52 | GCACGGUCUACGAGACCUC | 748 |
| GGAACCGGUGAGUACACCG | 53 | GGAACCGGUGAGUACACCG | 53 | CGGUGUACUCACCGGUUCC | 749 |
| CGGAACCGGUGAGUACACC | 54 | CGGAACCGGUGAGUACACC | 54 | GGUGUACUCACCGGUUCCG | 750 |
| CGGUGAGUACACCGGAAUU | 55 | CGGUGAGUACACCGGAAUU | 55 | AAUUCCGGUGUACUCACCG | 751 |
| GCGGAACCGGUGAGUACAC | 56 | GCGGAACCGGUGAGUACAC | 56 | GUGUACUCACCGGUUCCGC | 752 |
| AACCGGUGAGUACACCGGA | 57 | AACCGGUGAGUACACCGGA | 57 | UCCGGUGUACUCACCGGUU | 753 |
| ACCGGUGAGUACACCGGAA | 58 | ACCGGUGAGUACACCGGAA | 58 | UUCCGGUGUACUCACCGGU | 754 |
| CUGCGGAACCGGUGAGUAC | 59 | CUGCGGAACCGGUGAGUAC | 59 | GUACUCACCGGUUCCGCAG | 755 |
| GUCUGCGGAACCGGUGAGU | 60 | GUCUGCGGAACCGGUGAGU | 60 | ACUCACCGGUUCCGCAGAC | 756 |
| GAACCGGUGAGUACACCGG | 61 | GAACCGGUGAGUACACCGG | 61 | CCGGUGUACUCACCGGUUC | 757 |
| UGCGGAACCGGUGAGUACA | 62 | UGCGGAACCGGUGAGUACA | 62 | UGUACUCACCGGUUCCGCA | 758 |
| UCUGCGGAACCGGUGAGUA | 63 | UCUGCGGAACCGGUGAGUA | 63 | UACUCACCGGUUCCGCAGA | 759 |
| GGGAGAGCCAUAGUGGUCU | 64 | GGGAGAGCCAUAGUGGUCU | 64 | AGACCACUAUGGCUCUCCC | 760 |
| GUGGUCUGCGGAACCGGUG | 65 | GUGGUCUGCGGAACCGGUG | 65 | CACCGGUUCCGCAGACCAC | 761 |
| GGUCUGCGGAACCGGUGAG | 66 | GGUCUGCGGAACCGGUGAG | 66 | CUCACCGGUUCCGCAGACC | 762 |
| CGGGAGAGCCAUAGUGGUC | 67 | CGGGAGAGCCAUAGUGGUC | 67 | GACCACUAUGGCUCUCCCG | 763 |
| CCGGGAGAGCCAUAGUGGU | 68 | CCGGGAGAGCCAUAGUGGU | 68 | ACCACUAUGGCUCUCCCGG | 764 |
| UGGUCUGCGGAACCGGUGA | 69 | UGGUCUGCGGAACCGGUGA | 69 | UCACCGGUUCCGCAGACCA | 765 |
| GUGAGUACACCGGAAUUGC | 70 | GUGAGUACACCGGAAUUGC | 70 | GCAAUUCCGGUGUACUCAC | 766 |
| UGAGUACACCGGAAUUGCC | 71 | UGAGUACACCGGAAUUGCC | 71 | GGCAAUUCCGGUGUACUCA | 767 |
| GGUGAGUACACCGGAAUUG | 72 | GGUGAGUACACCGGAAUUG | 72 | CAAUUCCGGUGUACUCACC | 768 |
| GAGCCAUAGUGGUCUGCGG | 73 | GAGCCAUAGUGGUCUGCGG | 73 | CCGCAGACCACUAUGGCUC | 769 |
| AGAGCCAUAGUGGUCUGCG | 74 | AGAGCCAUAGUGGUCUGCG | 74 | CGCAGACCACUAUGGCUCU | 770 |
| UAGUGGUCUGCGGAACCGG | 75 | UAGUGGUCUGCGGAACCGG | 75 | CCGGUUCCGCAGACCACUA | 771 |
| AUAGUGGUCUGCGGAACCG | 76 | AUAGUGGUCUGCGGAACCG | 76 | CGGUUCCGCAGACCACUAU | 772 |
| GAGAGCCAUAGUGGUCUGC | 77 | GAGAGCCAUAGUGGUCUGC | 77 | GCAGACCACUAUGGCUCUC | 773 |
| GCCAUAGUGGUCUGCGGAA | 78 | GCCAUAGUGGUCUGCGGAA | 78 | UUCCGCAGACCACUAUGGC | 774 |
| AGUGGUCUGCGGAACCGGU | 79 | AGUGGUCUGCGGAACCGGU | 79 | ACCGGUUCCGCAGACCACU | 775 |
| CAUAGUGGUCUGCGGAACC | 80 | CAUAGUGGUCUGCGGAACC | 80 | GGUUCCGCAGACCACUAUG | 776 |
| AGCCAUAGUGGUCUGCGGA | 81 | AGCCAUAGUGGUCUGCGGA | 81 | UCCGCAGACCACUAUGGCU | 777 |
| CCAUAGUGGUCUGCGGAAC | 82 | CCAUAGUGGUCUGCGGAAC | 82 | GUUCCGCAGACCACUAUGG | 778 |
| CCCCUCCCGGGAGAGCCAU | 83 | CCCCUCCCGGGAGAGCCAU | 83 | AUGGCUCUCCCGGGAGGGG | 779 |
| GGAGAGCCAUAGUGGUCUG | 84 | GGAGAGCCAUAGUGGUCUG | 84 | CAGACCACUAUGGCUCUCC | 780 |
| CCCGGGAGAGCCAUAGUGG | 85 | CCCGGGAGAGCCAUAGUGG | 85 | CCACUAUGGCUCUCCCGGG | 781 |
| CCCCCUCCCGGGAGAGCCA | 86 | CCCCCUCCCGGGAGAGCCA | 86 | UGGCUCUCCCGGGAGGGGG | 782 |
| UCCCGGGAGAGCCAUAGUG | 87 | UCCCGGGAGAGCCAUAGUG | 87 | CACUAUGGCUCUCCCGGGA | 783 |
| CCCCCCUCCCGGGAGAGCC | 88 | CCCCCCUCCCGGGAGAGCC | 88 | GGCUCUCCCGGGAGGGGGG | 784 |
| CCCUCCCGGGAGAGCCAUA | 89 | CCCUCCCGGGAGAGCCAUA | 89 | UAUGGCUCUCCCGGGAGGG | 785 |
| CCUCCCGGGAGAGCCAUAG | 90 | CCUCCCGGGAGAGCCAUAG | 90 | CUAUGGCUCUCCCGGGAGG | 786 |
| CUCCCGGGAGAGCCAUAGU | 91 | CUCCCGGGAGAGCCAUAGU | 91 | ACUAUGGCUCUCCCGGGAG | 787 |
| UGUUGCCGCGCAGGGGCCC | 92 | UGUUGCCGCGCAGGGGCCC | 92 | GGGCCCCUGCGCGGCAACA | 788 |
| CCCCCCCUCCCGGGAGAGC | 93 | CCCCCCCUCCCGGGAGAGC | 93 | GCUCUCCCGGGAGGGGGGG | 789 |
| CAUGGCGUUAGUAUGAGUG | 94 | CAUGGCGUUAGUAUGAGUG | 94 | CACUCAUACUAACGCCAUG | 790 |
| UAGCCAUGGCGUUAGUAUG | 95 | UAGCCAUGGCGUUAGUAUG | 95 | CAUACUAACGCCAUGGCUA | 791 |
| AGCCAUGGCGUUAGUAUGA | 96 | AGCCAUGGCGUUAGUAUGA | 96 | UCAUACUAACGCCAUGGCU | 792 |
| CCAUGGCGUUAGUAUGAGU | 97 | CCAUGGCGUUAGUAUGAGU | 97 | ACUCAUACUAACGCCAUGG | 793 |
| AUGGCGUUAGUAUGAGUGU | 98 | AUGGCGUUAGUAUGAGUGU | 98 | ACACUCAUACUAACGCCAU | 794 |
| AAGCGUCUAGCCAUGGCGU | 99 | AAGCGUCUAGCCAUGGCGU | 99 | ACGCCAUGGCUAGACGCUU | 795 |
| GUCUAGCCAUGGCGUUAGU | 100 | GUCUAGCCAUGGCGUUAGU | 100 | ACUAACGCCAUGGCUAGAC | 796 |
| AAAGCGUCUAGCCAUGGCG | 101 | AAAGCGUCUAGCCAUGGCG | 101 | CGCCAUGGCUAGACGCUUU | 797 |
| GCGUCUAGCCAUGGCGUUA | 102 | GCGUCUAGCCAUGGCGUUA | 102 | UAACGCCAUGGCUAGACGC | 798 |
| GCCAUGGCGUUAGUAUGAG | 103 | GCCAUGGCGUUAGUAUGAG | 103 | CUCAUACUAACGCCAUGGC | 799 |
| AGCGUCUAGCCAUGGCGUU | 104 | AGCGUCUAGCCAUGGCGUU | 104 | AACGCCAUGGCUAGACGCU | 800 |
| CGUCUAGCCAUGGCGUUAG | 105 | CGUCUAGCCAUGGCGUUAG | 105 | CUAACGCCAUGGCUAGACG | 801 |
| UCUAGCCAUGGCGUUAGUA | 106 | UCUAGCCAUGGCGUUAGUA | 106 | UACUAACGCCAUGGCUAGA | 802 |
| GAAAGCGUCUAGCCAUGGC | 107 | GAAAGCGUCUAGCCAUGGC | 107 | GCCAUGGCUAGACGCUUUC | 803 |
| CUAGCCAUGGCGUUAGUAU | 108 | CUAGCCAUGGCGUUAGUAU | 108 | AUACUAACGCCAUGGCUAG | 804 |
| CACUCCCCUGUGAGGAACU | 109 | CACUCCCCUGUGAGGAACU | 109 | AGUUCCUCACAGGGGAGUG | 805 |
| ACCUCAAAGAAAAACCAAA | 110 | ACCUCAAAGAAAAACCAAA | 110 | UUUGGUUUUUCUUUGAGGU | 806 |
| CGCAGAAAGCGUCUAGCCA | 111 | CGCAGAAAGCGUCUAGCCA | 111 | UGGCUAGACGCUUUCUGCG | 807 |
| GGGUAAGGUCAUCGAUACC | 112 | GGGUAAGGUCAUCGAUACC | 112 | GGUAUCGAUGACCUUACCC | 808 |
| CAGAAAGCGUCUAGCCAUG | 113 | CAGAAAGCGUCUAGCCAUG | 113 | CAUGGCUAGACGCUUUCUG | 809 |
| AAACCUCAAAGAAAAACCA | 114 | AAACCUCAAAGAAAAACCA | 114 | UGGUUUUUCUUUGAGGUUU | 810 |
| GCAGAAAGCGUCUAGCCAU | 115 | GCAGAAAGCGUCUAGCCAU | 115 | AUGGCUAGACGCUUUCUGC | 811 |
| AGAAAGCGUCUAGCCAUGG | 116 | AGAAAGCGUCUAGCCAUGG | 116 | CCAUGGCUAGACGCUUUCU | 812 |
| ACGCAGAAAGCGUCUAGCC | 117 | ACGCAGAAAGCGUCUAGCC | 117 | GGCUAGACGCUUUCUGCGU | 813 |
| AACCUCAAAGAAAAACCAA | 118 | AACCUCAAAGAAAAACCAA | 118 | UUGGUUUUUCUUUGAGGUU | 814 |
| UGGGUAAGGUCAUCGAUAC | 119 | UGGGUAAGGUCAUCGAUAC | 119 | GUAUCGAUGACCUUACCCA | 815 |
| GUAAGGUCAUCGAUACCCU | 120 | GUAAGGUCAUCGAUACCCU | 120 | AGGGUAUCGAUGACCUUAC | 816 |
| UUCACGCAGAAAGCGUCUA | 121 | UUCACGCAGAAAGCGUCUA | 121 | UAGACGCUUUCUGCGUGAA | 817 |
| GGUAAGGUCAUCGAUACCC | 122 | GGUAAGGUCAUCGAUACCC | 122 | GGGUAUCGAUGACCUUACC | 818 |
| AUCACUCCCCUGUGAGGAA | 123 | AUCACUCCCCUGUGAGGAA | 123 | UUCCUCACAGGGGAGUGAU | 819 |
| UCACUCCCCUGUGAGGAAC | 124 | UCACUCCCCUGUGAGGAAC | 124 | GUUCCUCACAGGGGAGUGA | 820 |
| UGUCUUCACGCAGAAAGCG | 125 | UGUCUUCACGCAGAAAGCG | 125 | CGCUUUCUGCGUGAAGACA | 821 |
| UCACGCAGAAAGCGUCUAG | 126 | UCACGCAGAAAGCGUCUAG | 126 | CUAGACGCUUUCUGCGUGA | 822 |
| CACGCAGAAAGCGUCUAGC | 127 | CACGCAGAAAGCGUCUAGC | 127 | GCUAGACGCUUUCUGCGUG | 823 |
| GACCGGGUCCUUUCUUGGA | 128 | GACCGGGUCCUUUCUUGGA | 128 | UCCAAGAAAGGACCCGGUC | 824 |
| GAGGAACUACUGUCUUCAC | 129 | GAGGAACUACUGUCUUCAC | 129 | GUGAAGACAGUAGUUCCUC | 825 |
| CUGUGAGGAACUACUGUCU | 130 | CUGUGAGGAACUACUGUCU | 130 | AGACAGUAGUUCCUCACAG | 826 |
| GGAACUACUGUCUUCACGC | 131 | GGAACUACUGUCUUCACGC | 131 | GCGUGAAGACAGUAGUUCC | 827 |
| ACUCCCCUGUGAGGAACUA | 132 | ACUCCCCUGUGAGGAACUA | 132 | UAGUUCCUCACAGGGGAGU | 828 |
| GUCUUCACGCAGAAAGCGU | 133 | GUCUUCACGCAGAAAGCGU | 133 | ACGCUUUCUGCGUGAAGAC | 829 |
| AGGAACUACUGUCUUCACG | 134 | AGGAACUACUGUCUUCACG | 134 | CGUGAAGACAGUAGUUCCU | 830 |
| CCUGUGAGGAACUACUGUC | 135 | CCUGUGAGGAACUACUGUC | 135 | GACAGUAGUUCCUCACAGG | 831 |
| UGUGAGGAACUACUGUCUU | 136 | UGUGAGGAACUACUGUCUU | 136 | AAGACAGUAGUUCCUCACA | 832 |
| UCUUCACGCAGAAAGCGUC | 137 | UCUUCACGCAGAAAGCGUC | 137 | GACGCUUUCUGCGUGAAGA | 833 |
| GAACUACUGUCUUCACGCA | 138 | GAACUACUGUCUUCACGCA | 138 | UGCGUGAAGACAGUAGUUC | 834 |
| CCCUGUGAGGAACUACUGU | 139 | CCCUGUGAGGAACUACUGU | 139 | ACAGUAGUUCCUCACAGGG | 835 |
| CUUCACGCAGAAAGCGUCU | 140 | CUUCACGCAGAAAGCGUCU | 140 | AGACGCUUUCUGCGUGAAG | 836 |
| UGAGGAACUACUGUCUUCA | 141 | UGAGGAACUACUGUCUUCA | 141 | UGAAGACAGUAGUUCCUCA | 837 |
| UGGCGUUAGUAUGAGUGUC | 142 | UGGCGUUAGUAUGAGUGUC | 142 | GACACUCAUACUAACGCCA | 838 |
| CCCCUGUGAGGAACUACUG | 143 | CCCCUGUGAGGAACUACUG | 143 | CAGUAGUUCCUCACAGGGG | 839 |
| GUGAGGAACUACUGUCUUC | 144 | GUGAGGAACUACUGUCUUC | 144 | GAAGACAGUAGUUCCUCAC | 840 |
| GGCGUUAGUAUGAGUGUCG | 145 | GGCGUUAGUAUGAGUGUCG | 145 | CGACACUCAUACUAACGCC | 841 |
| GCCGAGUAGUGUUGGGUCG | 146 | GCCGAGUAGUGUUGGGUCG | 146 | CGACCCAACACUACUCGGC | 842 |
| ACUGUCUUCACGCAGAAAG | 147 | ACUGUCUUCACGCAGAAAG | 147 | CUUUCUGCGUGAAGACAGU | 843 |
| UGGGUCGCGAAAGGCCUUG | 148 | UGGGUCGCGAAAGGCCUUG | 148 | CAAGGCCUUUCGCGACCCA | 844 |
| CUACUGUCUUCACGCAGAA | 149 | CUACUGUCUUCACGCAGAA | 149 | UUCUGCGUGAAGACAGUAG | 845 |
| CGAGUAGUGUUGGGUCGCG | 150 | CGAGUAGUGUUGGGUCGCG | 150 | CGCGACCCAACACUACUCG | 846 |
| GUAGUGUUGGGUCGCGAAA | 151 | GUAGUGUUGGGUCGCGAAA | 151 | UUUCGCGACCCAACACUAC | 847 |
| UAAACCUCAAAGAAAAACC | 152 | UAAACCUCAAAGAAAAACC | 152 | GGUUUUUCUUUGAGGUUUA | 848 |
| CCGAGUAGUGUUGGGUCGC | 153 | CCGAGUAGUGUUGGGUCGC | 153 | GCGACCCAACACUACUCGG | 849 |
| AGCCGAGUAGUGUUGGGUC | 154 | AGCCGAGUAGUGUUGGGUC | 154 | GACCCAACACUACUCGGCU | 850 |
| GUCGCGAAAGGCCUUGUGG | 155 | GUCGCGAAAGGCCUUGUGG | 155 | CCACAAGGCCUUUCGCGAC | 851 |
| UAGUGUUGGGUCGCGAAAG | 156 | UAGUGUUGGGUCGCGAAAG | 156 | CUUUCGCGACCCAACACUA | 852 |
| CUAGCCGAGUAGUGUUGGG | 157 | CUAGCCGAGUAGUGUUGGG | 157 | CCCAACACUACUCGGCUAG | 853 |
| GAGUAGUGUUGGGUCGCGA | 158 | GAGUAGUGUUGGGUCGCGA | 158 | UCGCGACCCAACACUACUC | 854 |
| UCGCGAAAGGCCUUGUGGU | 159 | UCGCGAAAGGCCUUGUGGU | 159 | ACCACAAGGCCUUUCGCGA | 855 |
| GCGUUAGUAUGAGUGUCGU | 160 | GCGUUAGUAUGAGUGUCGU | 160 | ACGACACUCAUACUAACGC | 856 |
| UAGCCGAGUAGUGUUGGGU | 161 | UAGCCGAGUAGUGUUGGGU | 161 | ACCCAACACUACUCGGCUA | 857 |
| AACUACUGUCUUCACGCAG | 162 | AACUACUGUCUUCACGCAG | 162 | CUGCGUGAAGACAGUAGUU | 858 |
| CGCGAAAGGCCUUGUGGUA | 163 | CGCGAAAGGCCUUGUGGUA | 163 | UACCACAAGGCCUUUCGCG | 859 |
| AGUGUUGGGUCGCGAAAGG | 164 | AGUGUUGGGUCGCGAAAGG | 164 | CCUUUCGCGACCCAACACU | 860 |
| GUUGGGUCGCGAAAGGCCU | 165 | GUUGGGUCGCGAAAGGCCU | 165 | AGGCCUUUCGCGACCCAAC | 861 |
| AGUAGUGUUGGGUCGCGAA | 166 | AGUAGUGUUGGGUCGCGAA | 166 | UUCGCGACCCAACACUACU | 862 |
| UUGGGUCGCGAAAGGCCUU | 167 | UUGGGUCGCGAAAGGCCUU | 167 | AAGGCCUUUCGCGACCCAA | 863 |
| UCCCCUGUGAGGAACUACU | 168 | UCCCCUGUGAGGAACUACU | 168 | AGUAGUUCCUCACAGGGGA | 864 |
| UACUGUCUUCACGCAGAAA | 169 | UACUGUCUUCACGCAGAAA | 169 | UUUCUGCGUGAAGACAGUA | 865 |
| GUGUUGGGUCGCGAAAGGC | 170 | GUGUUGGGUCGCGAAAGGC | 170 | GCCUUUCGCGACCCAACAC | 866 |
| ACUACUGUCUUCACGCAGA | 171 | ACUACUGUCUUCACGCAGA | 171 | UCUGCGUGAAGACAGUAGU | 867 |
| CUGUCUUCACGCAGAAAGC | 172 | CUGUCUUCACGCAGAAAGC | 172 | GCUUUCUGCGUGAAGACAG | 868 |
| GGGUCGCGAAAGGCCUUGU | 173 | GGGUCGCGAAAGGCCUUGU | 173 | ACAAGGCCUUUCGCGACCC | 869 |
| CCUAAACCUCAAAGAAAAA | 174 | CCUAAACCUCAAAGAAAAA | 174 | UUUUUCUUUGAGGUUUAGG | 870 |
| GGUCGCGAAAGGCCUUGUG | 175 | GGUCGCGAAAGGCCUUGUG | 175 | CACAAGGCCUUUCGCGACC | 871 |
| CUAAACCUCAAAGAAAAAC | 176 | CUAAACCUCAAAGAAAAAC | 176 | GUUUUUCUUUGAGGUUUAG | 872 |
| UGUUGGGUCGCGAAAGGCC | 177 | UGUUGGGUCGCGAAAGGCC | 177 | GGCCUUUCGCGACCCAACA | 873 |
| CUCCCCUGUGAGGAACUAC | 178 | CUCCCCUGUGAGGAACUAC | 178 | GUAGUUCCUCACAGGGGAG | 874 |
| UCCUAAACCUCAAAGAAAA | 179 | UCCUAAACCUCAAAGAAAA | 179 | UUUUCUUUGAGGUUUAGGA | 875 |
| ACCGGGUCCUUUCUUGGAU | 180 | ACCGGGUCCUUUCUUGGAU | 180 | AUCCAAGAAAGGACCCGGU | 876 |
| AAUCCUAAACCUCAAAGAA | 181 | AAUCCUAAACCUCAAAGAA | 181 | UUCUUUGAGGUUUAGGAUU | 877 |
| UCAAUGCCUGGAGAUUUGG | 182 | UCAAUGCCUGGAGAUUUGG | 182 | CCAAAUCUCCAGGCAUUGA | 878 |
| AUGCCUGGAGAUUUGGGCG | 183 | AUGCCUGGAGAUUUGGGCG | 183 | CGCCCAAAUCUCCAGGCAU | 879 |
| AAUGCCUGGAGAUUUGGGC | 184 | AAUGCCUGGAGAUUUGGGC | 184 | GCCCAAAUCUCCAGGCAUU | 880 |
| CCGACCUCAUGGGGUACAU | 185 | CCGACCUCAUGGGGUACAU | 185 | AUGUACCCCAUGAGGUCGG | 881 |
| GCUCAAUGCCUGGAGAUUU | 186 | GCUCAAUGCCUGGAGAUUU | 186 | AAAUCUCCAGGCAUUGAGC | 882 |
| CUCAAUGCCUGGAGAUUUG | 187 | CUCAAUGCCUGGAGAUUUG | 187 | CAAAUCUCCAGGCAUUGAG | 883 |
| GCUAGCCGAGUAGUGUUGG | 188 | GCUAGCCGAGUAGUGUUGG | 188 | CCAACACUACUCGGCUAGC | 884 |
| CGCUCAAUGCCUGGAGAUU | 189 | CGCUCAAUGCCUGGAGAUU | 189 | AAUCUCCAGGCAUUGAGCG | 885 |
| CAAUGCCUGGAGAUUUGGG | 190 | CAAUGCCUGGAGAUUUGGG | 190 | CCCAAAUCUCCAGGCAUUG | 886 |
| GCCGACCUCAUGGGGUACA | 191 | GCCGACCUCAUGGGGUACA | 191 | UGUACCCCAUGAGGUCGGC | 887 |
| AUCCUAAACCUCAAAGAAA | 192 | AUCCUAAACCUCAAAGAAA | 192 | UUUCUUUGAGGUUUAGGAU | 888 |
| AGAUUUGGGCGUGCCCCCG | 193 | AGAUUUGGGCGUGCCCCCG | 193 | CGGGGGCACGCCCAAAUCU | 889 |
| CCCGCUCAAUGCCUGGAGA | 194 | CCCGCUCAAUGCCUGGAGA | 194 | UCUCCAGGCAUUGAGCGGG | 890 |
| GAGAUUUGGGCGUGCCCCC | 195 | GAGAUUUGGGCGUGCCCCC | 195 | GGGGGCACGCCCAAAUCUC | 891 |
| GGAGAUUUGGGCGUGCCCC | 196 | GGAGAUUUGGGCGUGCCCC | 196 | GGGGCACGCCCAAAUCUCC | 892 |
| GAUUUGGGCGUGCCCCCGC | 197 | GAUUUGGGCGUGCCCCCGC | 197 | GCGGGGGCACGCCCAAAUC | 893 |
| CCGCUCAAUGCCUGGAGAU | 198 | CCGCUCAAUGCCUGGAGAU | 198 | AUCUCCAGGCAUUGAGCGG | 894 |
| AGUACACCGGAAUUGCCAG | 199 | AGUACACCGGAAUUGCCAG | 199 | CUGGCAAUUCCGGUGUACU | 895 |
| UACACCGGAAUUGCCAGGA | 200 | UACACCGGAAUUGCCAGGA | 200 | UCCUGGCAAUUCCGGUGUA | 896 |
| GAGUACACCGGAAUUGCCA | 201 | GAGUACACCGGAAUUGCCA | 201 | UGGCAAUUCCGGUGUACUC | 897 |
| GUACACCGGAAUUGCCAGG | 202 | GUACACCGGAAUUGCCAGG | 202 | CCUGGCAAUUCCGGUGUAC | 898 |
| UUGCCGCGCAGGGGCCCCA | 203 | UUGCCGCGCAGGGGCCCCA | 203 | UGGGGCCCCUGCGCGGCAA | 899 |
| CUGGAGAUUUGGGCGUGCC | 204 | CUGGAGAUUUGGGCGUGCC | 204 | GGCACGCCCAAAUCUCCAG | 900 |
| GUUGCCGCGCAGGGGCCCC | 205 | GUUGCCGCGCAGGGGCCCC | 205 | GGGGCCCCUGCGCGGCAAC | 901 |
| GCCUGGAGAUUUGGGCGUG | 206 | GCCUGGAGAUUUGGGCGUG | 206 | CACGCCCAAAUCUCCAGGC | 902 |
| UGGAGAUUUGGGCGUGGCC | 207 | UGGAGAUUUGGGCGUGCCC | 207 | GGGCACGCCCAAAUCUCCA | 903 |
| CCUGGAGAUUUGGGCGUGC | 208 | CCUGGAGAUUUGGGCGUGC | 208 | GCACGCCCAAAUCUCCAGG | 904 |
| UGCUAGCCGAGUAGUGUUG | 209 | UGCUAGCCGAGUAGUGUUG | 209 | CAACACUACUCGGCUAGCA | 905 |
| UGCCUGGAGAUUUGGGCGU | 210 | UGCCUGGAGAUUUGGGCGU | 210 | ACGCCCAAAUCUCCAGGCA | 906 |
| CUGCUAGCCGAGUAGUGUU | 211 | CUGCUAGCCGAGUAGUGUU | 211 | AACACUACUCGGCUAGCAG | 907 |
| ACUGCUAGCCGAGUAGUGU | 212 | ACUGCUAGCCGAGUAGUGU | 212 | ACACUACUCGGCUAGCAGU | 908 |
| GACUGCUAGCCGAGUAGUG | 213 | GACUGCUAGCCGAGUAGUG | 213 | CACUACUCGGCUAGCAGUC | 909 |
| AGACUGCUAGCCGAGUAGU | 214 | AGACUGCUAGCCGAGUAGU | 214 | ACUACUCGGCUAGCAGUCU | 910 |
| ACCCGCUCAAUGCCUGGAG | 215 | ACCCGCUCAAUGCCUGGAG | 215 | CUCCAGGCAUUGAGCGGGU | 911 |
| AACCCGCUCAAUGCCUGGA | 216 | AACCCGCUCAAUGCCUGGA | 216 | UCCAGGCAUUGAGCGGGUU | 912 |
| UGCCGCGCAGGGGCCCCAG | 217 | UGCCGCGCAGGGGCCCCAG | 217 | CUGGGGCCCCUGCGCGGCA | 913 |
| AGGGGCCCCAGGUUGGGUG | 218 | AGGGGCCCCAGGUUGGGUG | 218 | CACCCAACCUGGGGCCCCU | 914 |
| GGGCCCCAGGUUGGGUGUG | 219 | GGGCCCCAGGUUGGGUGUG | 219 | CACACCCAACCUGGGGCCC | 915 |
| CAGGGGCCCCAGGUUGGGU | 220 | CAGGGGCCCCAGGUUGGGU | 220 | ACCCAACCUGGGGCCCCUG | 916 |
| GGCCCCAGGUUGGGUGUGC | 221 | GGCCCCAGGUUGGGUGUGC | 221 | GCACACCCAACCUGGGGCC | 917 |
| CGCAGGGGCCCCAGGUUGG | 222 | CGCAGGGGCCCCAGGUUGG | 222 | CCAACCUGGGGCCCCUGCG | 918 |
| UGGGCAGGAUGGCUCCUGU | 223 | UGGGCAGGAUGGCUCCUGU | 223 | ACAGGAGCCAUCCUGCCCA | 919 |
| GCCCCAGGUUGGGUGUGCG | 224 | GCCCCAGGUUGGGUGUGCG | 224 | CGCACACCCAACCUGGGGC | 920 |
| GCAGGGGCCCCAGGUUGGG | 225 | GCAGGGGCCCCAGGUUGGG | 225 | CCCAACCUGGGGCCCCUGC | 921 |
| GGGCAGGAUGGCUCCUGUC | 226 | GGGCAGGAUGGCUCCUGUC | 226 | GACAGGAGCCAUCCUGCCC | 922 |
| GGGGCCCCAGGUUGGGUGU | 227 | GGGGCCCCAGGUUGGGUGU | 227 | ACACCCAACCUGGGGCCCC | 923 |
| GCCGCGCAGGGGCCCCAGG | 228 | GCCGCGCAGGGGCCCCAGG | 228 | CCUGGGGCCCCUGCGCGGC | 924 |
| GCGCAGGGGCCCCAGGUUG | 229 | GCGCAGGGGCCCCAGGUUG | 229 | CAACCUGGGGCCCCUGCGC | 925 |
| CGCGCAGGGGCCCCAGGUU | 230 | CGCGCAGGGGCCCCAGGUU | 230 | AACCUGGGGCCCCUGCGCG | 926 |
| CCGCGCAGGGGCCCCAGGU | 231 | CCGCGCAGGGGCCCCAGGU | 231 | ACCUGGGGCCCCUGCGCGG | 927 |
| AGGACGACCGGGUCCUUUC | 232 | AGGACGACCGGGUCCUUUC | 232 | GAAAGGACCCGGUCGUCCU | 928 |
| CAGGACGACCGGGUCCUUU | 233 | CAGGACGACCGGGUCCUUU | 233 | AAAGGACCCGGUCGUCCUG | 929 |
| UGCCAGGACGACCGGGUCC | 234 | UGCCAGGACGACCGGGUCC | 234 | GGACCCGGUCGUCCUGGCA | 930 |
| AUUGCCAGGACGACCGGGU | 235 | AUUGCCAGGACGACCGGGU | 235 | ACCCGGUCGUCCUGGCAAU | 931 |
| AAUUGCCAGGACGACCGGG | 236 | AAUUGCCAGGACGACCGGG | 236 | CCCGGUCGUCCUGGCAAUU | 932 |
| UUGCCAGGACGACCGGGUC | 237 | UUGCCAGGACGACCGGGUC | 237 | GACCCGGUCGUCCUGGCAA | 933 |
| CCAGGACGACCGGGUCCUU | 238 | CCAGGACGACCGGGUCCUU | 238 | AAGGACCCGGUCGUCCUGG | 934 |
| GCCAGGACGACCGGGUCCU | 239 | GCCAGGACGACCGGGUCCU | 239 | AGGACCCGGUCGUCCUGGC | 935 |
| GAAUUGCCAGGACGACCGG | 240 | GAAUUGCCAGGACGACCGG | 240 | CCGGUCGUCCUGGCAAUUC | 936 |
| ACGACCGGGUCCUUUCUUG | 241 | ACGACCGGGUCCUUUCUUG | 241 | CAAGAAAGGACCCGGUCGU | 937 |
| GACGACCGGGUCCUUUCUU | 242 | GACGACCGGGUCCUUUCUU | 242 | AAGAAAGGACCCGGUCGUC | 938 |
| CGACCGGGUCCUUUCUUGG | 243 | CGACCGGGUCCUUUCUUGG | 243 | CCAAGAAAGGACCCGGUCG | 939 |
| GGACGACCGGGUCCUUUCU | 244 | GGACGACCGGGUCCUUUCU | 244 | AGAAAGGACCCGGUCGUCC | 940 |
| CCGGAAUUGCCAGGACGAC | 245 | CCGGAAUUGCCAGGACGAC | 245 | GUCGUCCUGGCAAUUCCGG | 941 |
| ACACCGGAAUUGCCAGGAC | 246 | ACACCGGAAUUGCCAGGAC | 246 | GUCCUGGCAAUUCCGGUGU | 942 |
| ACCGGAAUUGCCAGGACGA | 247 | ACCGGAAUUGCCAGGACGA | 247 | UCGUCCUGGCAAUUCCGGU | 943 |
| CGGAAUUGCCAGGACGACC | 248 | CGGAAUUGCCAGGACGACC | 248 | GGUCGUCCUGGCAAUUCCG | 944 |
| GGAAUUGCCAGGACGACCG | 249 | GGAAUUGCCAGGACGACCG | 249 | CGGUCGUCCUGGCAAUUCC | 945 |
| CACCGGAAUUGCCAGGACG | 250 | CACCGGAAUUGCCAGGACG | 250 | CGUCCUGGCAAUUCCGGUG | 946 |
| CCCCAGGUUGGGUGUGCGC | 251 | CCCCAGGUUGGGUGUGCGC | 251 | GCGCACACCCAACCUGGGG | 947 |
| GAUCGUUGGUGGAGUUUAC | 252 | GAUCGUUGGUGGAGUUUAC | 252 | GUAAACUCCACCAACGAUC | 948 |
| CAGAUCGUUGGUGGAGUUU | 253 | CAGAUCGUUGGUGGAGUUU | 253 | AAACUCCACCAACGAUCUG | 949 |
| AGAUCGUUGGUGGAGUUUA | 254 | AGAUCGUUGGUGGAGUUUA | 254 | UAAACUCCACCAACGAUCU | 950 |
| CCCAGGUUGGGUGUGCGCG | 255 | CCCAGGUUGGGUGUGCGCG | 255 | CGCGCACACCCAACCUGGG | 951 |
| CCAGGUUGGGUGUGCGCGC | 256 | CCAGGUUGGGUGUGCGCGC | 256 | GCGCGCACACCCAACCUGG | 952 |
| AGGUUGGGUGUGCGCGCGA | 257 | AGGUUGGGUGUGCGCGCGA | 257 | UCGCGCGCACACCCAACCU | 953 |
| CAGGUUGGGUGUGCGCGCG | 258 | CAGGUUGGGUGUGCGCGCG | 258 | CGCGCGCACACCCAACCUG | 954 |
| GGUUGGGUGUGCGCGCGAC | 259 | GGUUGGGUGUGCGCGCGAC | 259 | GUCGCGCGCACACCCAACC | 955 |
| GAAAAACCAAACGUAACAC | 260 | GAAAAACCAAACGUAACAC | 260 | GUGUUACGUUUGGUUUUUC | 956 |
| AGAAAAACCAAACGUAACA | 261 | AGAAAAACCAAACGUAACA | 261 | UGUUACGUUUGGUUUUUCU | 957 |
| AACCAAACGUAACACCAAC | 262 | AACCAAACGUAACACCAAC | 262 | GUUGGUGUUACGUUUGGUU | 958 |
| AAAGAAAAACCAAACGUAA | 263 | AAAGAAAAACCAAACGUAA | 263 | UUACGUUUGGUUUUUCUUU | 959 |
| AAAAACCAAACGUAACACC | 264 | AAAAACCAAACGUAACACC | 264 | GGUGUUACGUUUGGUUUUU | 960 |
| AAGAAAAACCAAACGUAAC | 265 | AAGAAAAACCAAACGUAAC | 265 | GUUACGUUUGGUUUUUCUU | 961 |
| CAAAGAAAAACCAAACGUA | 266 | CAAAGAAAAACCAAACGUA | 266 | UACGUUUGGUUUUUCUUUG | 962 |
| ACCCCCGGCGUAGGUCGCG | 267 | ACCCCCGGCGUAGGUCGCG | 267 | CGCGACCUACGCCGGGGGU | 963 |
| GACCCCCGGCGUAGGUCGC | 268 | GACCCCCGGCGUAGGUCGC | 268 | GCGACCUACGCCGGGGGUC | 964 |
| CGUUAGUAUGAGUGUCGUG | 269 | CGUUAGUAUGAGUGUCGUG | 269 | CACGACACUCAUACUAACG | 965 |
| GUUAGUAUGAGUGUCGUGC | 270 | GUUAGUAUGAGUGUCGUGC | 270 | GCACGACACUCAUACUAAC | 966 |
| UUAGUAUGAGUGUCGUGCA | 271 | UUAGUAUGAGUGUCGUGCA | 271 | UGCACGACACUCAUACUAA | 967 |
| CCAAACGUAACACCAACCG | 272 | CCAAACGUAACACCAACCG | 272 | CGGUUGGUGUUACGUUUGG | 968 |
| ACCAAACGUAACACCAACC | 273 | ACCAAACGUAACACCAACC | 273 | GGUUGGUGUUACGUUUGGU | 969 |
| UUGGGCGUGCCCCCGCGAG | 274 | UUGGGCGUGCCCCCGCGAG | 274 | CUCGCGGGGGCACGCCCAA | 970 |
| AUUUGGGCGUGCCCCCGCG | 275 | AUUUGGGCGUGCCCCCGCG | 275 | CGCGGGGGCACGCCCAAAU | 971 |
| UUUGGGCGUGCCCCCGCGA | 276 | UUUGGGCGUGCCCCCGCGA | 276 | UCGCGGGGGCACGCCCAAA | 972 |
| AAACCAAACGUAACACCAA | 277 | AAACCAAACGUAACACCAA | 277 | UUGGUGUUACGUUUGGUUU | 973 |
| UGGGCGUGCCCCCGCGAGA | 278 | UGGGCGUGCCCCCGCGAGA | 278 | UCUCGCGGGGGCACGCCCA | 974 |
| GUCAGAUCGUUGGUGGAGU | 279 | GUCAGAUCGUUGGUGGAGU | 279 | ACUCCACCAACGAUCUGAC | 975 |
| GUGUCGUGCAGCCUCCAGG | 280 | GUGUCGUGCAGCCUCCAGG | 280 | CCUGGAGGCUGCACGACAC | 976 |
| GGUCAGAUCGUUGGUGGAG | 281 | GGUCAGAUCGUUGGUGGAG | 281 | CUCCACCAACGAUCUGACC | 977 |
| AGUGUCGUGCAGCCUCCAG | 282 | AGUGUCGUGCAGCCUCCAG | 282 | CUGGAGGCUGCACGACACU | 978 |
| GAGUGUCGUGCAGCCUCCA | 283 | GAGUGUCGUGCAGCCUCCA | 283 | UGGAGGCUGCACGACACUC | 979 |
| UCGUAGACCGUGCACCAUG | 284 | UCGUAGACCGUGCACCAUG | 284 | CAUGGUGCACGGUCUACGA | 980 |
| GACCGUGCACCAUGAGCAC | 285 | GACCGUGCACCAUGAGCAC | 285 | GUGCUCAUGGUGCACGGUC | 981 |
| AGUAUGAGUGUCGUGCAGC | 286 | AGUAUGAGUGUCGUGCAGC | 286 | GCUGCACGACACUCAUACU | 982 |
| UAGUAUGAGUGUCGUGCAG | 287 | UAGUAUGAGUGUCGUGCAG | 287 | CUGCACGACACUCAUACUA | 983 |
| UCAGAUCGUUGGUGGAGUU | 288 | UCAGAUCGUUGGUGGAGUU | 288 | AACUCCACCAACGAUCUGA | 984 |
| AGACCGUGCACCAUGAGCA | 289 | AGACCGUGCACCAUGAGCA | 289 | UGCUCAUGGUGCACGGUCU | 985 |
| AAAACCAAACGUAACACCA | 290 | AAAACCAAACGUAACACCA | 290 | UGGUGUUACGUUUGGUUUU | 986 |
| GUAGACCGUGCACCAUGAG | 291 | GUAGACCGUGCACCAUGAG | 291 | CUCAUGGUGCACGGUCUAC | 987 |
| CUCGUAGACCGUGCACCAU | 292 | CUCGUAGACCGUGCACCAU | 292 | AUGGUGCACGGUCUACGAG | 988 |
| CGUAGACCGUGCACCAUGA | 293 | CGUAGACCGUGCACCAUGA | 293 | UCAUGGUGCACGGUCUACG | 989 |
| CCUGGGCUCAGCCCGGGUA | 294 | CCUGGGCUCAGCCCGGGUA | 294 | UACCCGGGCUGAGCCCAGG | 990 |
| UAGACCGUGCACCAUGAGC | 295 | UAGACCGUGCACCAUGAGC | 295 | GCUCAUGGUGCACGGUCUA | 991 |
| GGUCUCGUAGACCGUGCAC | 296 | GGUCUCGUAGACCGUGCAC | 296 | GUGCACGGUCUACGAGACC | 992 |
| UCUCGUAGACCGUGCACCA | 297 | UCUCGUAGACCGUGCACCA | 297 | UGGUGCACGGUCUACGAGA | 993 |
| GUCUCGUAGACCGUGCACC | 298 | GUCUCGUAGACCGUGCACC | 298 | GGUGCACGGUCUACGAGAC | 994 |
| UUGGGUAAGGUCAUCGAUA | 299 | UUGGGUAAGGUCAUCGAUA | 299 | UAUCGAUGACCUUACCCAA | 995 |
| UCGCCGACCUCAUGGGGUA | 300 | UCGCCGACCUCAUGGGGUA | 300 | UACCCCAUGAGGUCGGCGA | 996 |
| CCUCAAAGAAAAACCAAAC | 301 | CCUCAAAGAAAAACCAAAC | 301 | GUUUGGUUUUUCUUUGAGG | 997 |
| GGGCGUGCCCCCGCGAGAC | 302 | GGGCGUGCCCCCGCGAGAC | 302 | GUCUCGCGGGGGCACGCCC | 998 |
| GGAUGAACCGGCUGAUAGC | 303 | GGAUGAACCGGCUGAUAGC | 303 | GCUAUCAGCCGGUUCAUCC | 999 |
| UGGAUGAACCGGCUGAUAG | 304 | UGGAUGAACCGGCUGAUAG | 304 | CUAUCAGCCGGUUCAUCCA | 1000 |
| CUCAAAGAAAAACCAAACG | 305 | CUCAAAGAAAAACCAAACG | 305 | CGUUUGGUUUUUCUUUGAG | 1001 |
| AGGAAGACUUCCGAGCGGU | 306 | AGGAAGACUUCCGAGCGGU | 306 | ACCGCUCGGAAGUCUUCCU | 1002 |
| UCAAAGAAAAACCAAACGU | 307 | UCAAAGAAAAACCAAACGU | 307 | ACGUUUGGUUUUUCUUUGA | 1003 |
| GGAAGACUUCCGAGCGGUC | 308 | GGAAGACUUCCGAGCGGUC | 308 | GACCGCUCGGAAGUCUUCC | 1004 |
| CGCCGACCUCAUGGGGUAC | 309 | CGCCGACCUCAUGGGGUAC | 309 | GUACCCCAUGAGGUCGGCG | 1005 |
| CUUCCGAGCGGUCGCAACC | 310 | CUUCCGAGCGGUCGCAACC | 310 | GGUUGCGACCGCUCGGAAG | 1006 |
| GGCGUGCCCCCGCGAGACU | 311 | GGCGUGCCCCCGCGAGACU | 311 | AGUCUCGCGGGGGCACGCC | 1007 |
| UAUGAGUGUCGUGCAGCCU | 312 | UAUGAGUGUCGUGCAGCCU | 312 | AGGCUGCACGACACUCAUA | 1008 |
| UGCCCCCGCGAGACUGCUA | 313 | UGCCCCCGCGAGACUGCUA | 313 | UAGCAGUCUCGCGGGGGCA | 1009 |
| CGAGACUGCUAGCCGAGUA | 314 | CGAGACUGCUAGCCGAGUA | 314 | UACUCGGCUAGCAGUCUCG | 1010 |
| UGAGUGUCGUGCAGCCUCC | 315 | UGAGUGUCGUGCAGCCUCC | 315 | GGAGGCUGCACGACACUCA | 1011 |
| GCCCCCGCGAGACUGCUAG | 316 | GCCCCCGCGAGACUGCUAG | 316 | CUAGCAGUCUCGCGGGGGC | 1012 |
| GAGACUGCUAGCCGAGUAG | 317 | GAGACUGCUAGCCGAGUAG | 317 | CUACUCGGCUAGCAGUCUC | 1013 |
| CCCCCGCGAGACUGCUAGC | 318 | CCCCCGCGAGACUGCUAGC | 318 | GCUAGCAGUCUCGCGGGGG | 1014 |
| CGCGAGACUGCUAGCCGAG | 319 | CGCGAGACUGCUAGCCGAG | 319 | CUCGGCUAGCAGUCUCGCG | 1015 |
| GUAUGAGUGUCGUGCAGCC | 320 | GUAUGAGUGUCGUGCAGCC | 320 | GGCUGCACGACACUCAUAC | 1016 |
| AUGAGUGUCGUGCAGCCUC | 321 | AUGAGUGUCGUGCAGCCUC | 321 | GAGGCUGCACGACACUCAU | 1017 |
| GCGAGACUGCUAGCCGAGU | 322 | GCGAGACUGCUAGCCGAGU | 322 | ACUCGGCUAGCAGUCUCGC | 1018 |
| CCCCGCGAGACUGCUAGCC | 323 | CCCCGCGAGACUGCUAGCC | 323 | GGCUAGCAGUCUCGCGGGG | 1019 |
| CCGCGAGACUGCUAGCCGA | 324 | CCGCGAGACUGCUAGCCGA | 324 | UCGGCUAGCAGUCUCGCGG | 1020 |
| CCCGCGAGACUGCUAGCCG | 325 | CCCGCGAGACUGCUAGCCG | 325 | CGGCUAGCAGUCUCGCGGG | 1021 |
| GCGUGCCCCCGCGAGACUG | 326 | GCGUGCCCCCGCGAGACUG | 326 | CAGUCUCGCGGGGGCACGC | 1022 |
| GACCCCCCCUCCCGGGAGA | 327 | GACCCCCCCUCCCGGGAGA | 327 | UCUCCCGGGAGGGGGGGUC | 1023 |
| CGGGUCCUUUCUUGGAUCA | 328 | CGGGUCCUUUCUUGGAUCA | 328 | UGAUCCAAGAAAGGACCCG | 1024 |
| GUGCCCCCGCGAGACUGCU | 329 | GUGCCCCCGCGAGACUGCU | 329 | AGCAGUCUCGCGGGGGCAC | 1025 |
| CGUGCCCCCGCGAGACUGC | 330 | CGUGCCCCCGCGAGACUGC | 330 | GCAGUCUCGCGGGGGCACG | 1026 |
| UUCGCCGACCUCAUGGGGU | 331 | UUCGCCGACCUCAUGGGGU | 331 | ACCCCAUGAGGUCGGCGAA | 1027 |
| CGCCCACAGGACGUCAAGU | 332 | CGCCCACAGGACGUCAAGU | 332 | ACUUGACGUCCUGUGGGCG | 1028 |
| GCCCACAGGACGUCAAGUU | 333 | GCCCACAGGACGUCAAGUU | 333 | AACUUGACGUCCUGUGGGC | 1029 |
| ACCCCCCCUCCCGGGAGAG | 334 | ACCCCCCCUCCCGGGAGAG | 334 | CUCUCCCGGGAGGGGGGGU | 1030 |
| GGACCCCCCCUCCCGGGAG | 335 | GGACCCCCCCUCCCGGGAG | 335 | CUCCCGGGAGGGGGGGUCC | 1031 |
| CCGGGUCCUUUCUUGGAUC | 336 | CCGGGUCCUUUCUUGGAUC | 336 | GAUCCAAGAAAGGACCCGG | 1032 |
| CAGGACCCCCCCUCCCGGG | 337 | CAGGACCCCCCCUCCCGGG | 337 | CCCGGGAGGGGGGGUCCUG | 1033 |
| AGGACGUCAAGUUCCCGGG | 338 | AGGACGUCAAGUUCCCGGG | 338 | CCCGGGAACUUGACGUCCU | 1034 |
| AGGACCCCCCCUCCCGGGA | 339 | AGGACCCCCCCUCCCGGGA | 339 | UCCCGGGAGGGGGGGUCCU | 1035 |
| CCACAGGACGUCAAGUUCC | 340 | CCACAGGACGUCAAGUUCC | 340 | GGAACUUGACGUCCUGUGG | 1036 |
| CAGGACGUCAAGUUCCCGG | 341 | CAGGACGUCAAGUUCCCGG | 341 | CCGGGAACUUGACGUCCUG | 1037 |
| ACAGGACGUCAAGUUCCCG | 342 | ACAGGACGUCAAGUUCCCG | 342 | CGGGAACUUGACGUCCUGU | 1038 |
| CACAGGACGUCAAGUUCCC | 343 | CACAGGACGUCAAGUUCCC | 343 | GGGAACUUGACGUCCUGUG | 1039 |
| CAGUGGAUGAACCGGCUGA | 344 | CAGUGGAUGAACCGGCUGA | 344 | UCAGCCGGUUCAUCCACUG | 1040 |
| GGGCUCAGCCCGGGUACCC | 345 | GGGCUCAGCCCGGGUACCC | 345 | GGGUACCCGGGCUGAGCCC | 1041 |
| CCGAGCGGUCGCAACCUCG | 346 | CCGAGCGGUCGCAACCUCG | 346 | CGAGGUUGCGACCGCUCGG | 1042 |
| CUGGGCUCAGCCCGGGUAC | 347 | CUGGGCUCAGCCCGGGUAC | 347 | GUACCCGGGCUGAGCCCAG | 1043 |
| AGUGGAUGAACCGGCUGAU | 348 | AGUGGAUGAACCGGCUGAU | 348 | AUCAGCCGGUUCAUCCACU | 1044 |
| UCCGAGCGGUCGCAACCUC | 349 | UCCGAGCGGUCGCAACCUC | 349 | GAGGUUGCGACCGCUCGGA | 1045 |
| UGGGCUCAGCCCGGGUACC | 350 | UGGGCUCAGCCCGGGUACC | 350 | GGUACCCGGGCUGAGCCCA | 1046 |
| GGUACCCUUGGCCCCUCUA | 351 | GGUACCCUUGGCCCCUCUA | 351 | UAGAGGGGCCAAGGGUACC | 1047 |
| UUCCGAGCGGUCGCAACCU | 352 | UUCCGAGCGGUCGCAACCU | 352 | AGGUUGCGACCGCUCGGAA | 1048 |
| GGGUACCCUUGGCCCCUCU | 353 | GGGUACCCUUGGCCCCUCU | 353 | AGAGGGGCCAAGGGUACCC | 1049 |
| GGGUCCUUUCUUGGAUCAA | 354 | GGGUCCUUUCUUGGAUCAA | 354 | UUGAUCCAAGAAAGGACCC | 1050 |
| CCCACAGGACGUCAAGUUC | 355 | CCCACAGGACGUCAAGUUC | 355 | GAACUUGACGUCCUGUGGG | 1051 |
| GGUUGCUCUUUCUCUAUCU | 356 | GGUUGCUCUUUCUCUAUCU | 356 | AGAUAGAGAAAGAGCAACC | 1052 |
| GUGGGCAGGAUGGCUCCUG | 357 | GUGGGCAGGAUGGCUCCUG | 357 | CAGGAGCCAUCCUGCCCAC | 1053 |
| GGUGGGCAGGAUGGCUCCU | 358 | GGUGGGCAGGAUGGCUCCU | 358 | AGGAGCCAUCCUGCCCACC | 1054 |
| GUUGCUCUUUCUCUAUCUU | 359 | GUUGCUCUUUCUCUAUCUU | 359 | AAGAUAGAGAAAGAGCAAC | 1055 |
| GUGGAUGAACCGGCUGAUA | 360 | GUGGAUGAACCGGCUGAUA | 360 | UAUCAGCCGGUUCAUCCAC | 1056 |
| CCAGGACCCCCCCUCCCGG | 361 | CCAGGACCCCCCCUCCCGG | 361 | CCGGGAGGGGGGGUCCUGG | 1057 |
| GGGUGGGCAGGAUGGCUCC | 362 | GGGUGGGCAGGAUGGCUCC | 362 | GGAGCCAUCCUGCCCACCC | 1058 |
| CUUCACGGAGGCUAUGACU | 363 | CUUCACGGAGGCUAUGACU | 363 | AGUCAUAGCCUCCGUGAAG | 1059 |
| ACCGCCGCCCACAGGACGU | 364 | ACCGCCGCCCACAGGACGU | 364 | ACGUCCUGUGGGCGGCGGU | 1060 |
| UCCAGGACCCCCCCUCCCG | 365 | UCCAGGACCCCCCCUCCCG | 365 | CGGGAGGGGGGGUCCUGGA | 1061 |
| AUAUGAUGAUGAACUGGUC | 366 | AUAUGAUGAUGAACUGGUC | 366 | GACCAGUUCAUCAUCAUAU | 1062 |
| UUCACGGAGGCUAUGACUA | 367 | UUCACGGAGGCUAUGACUA | 367 | UAGUCAUAGCCUCCGUGAA | 1063 |
| UCACGGAGGCUAUGACUAG | 368 | UCACGGAGGCUAUGACUAG | 368 | CUAGUCAUAGCCUCCGUGA | 1064 |
| AUGAACCGGCUGAUAGCGU | 369 | AUGAACCGGCUGAUAGCGU | 369 | ACGCUAUCAGCCGGUUCAU | 1065 |
| GGGAUAUGAUGAUGAACUG | 370 | GGGAUAUGAUGAUGAACUG | 370 | CAGUUCAUCAUCAUAUCCC | 1066 |
| UGCAGUGGAUGAACCGGCU | 371 | UGCAGUGGAUGAACCGGCU | 371 | AGCCGGUUCAUCCACUGCA | 1067 |
| GUGCAGUGGAUGAACCGGC | 372 | GUGCAGUGGAUGAACCGGC | 372 | GCCGGUUCAUCCACUGCAC | 1068 |
| UGAACCGGCUGAUAGCGUU | 373 | UGAACCGGCUGAUAGCGUU | 373 | AACGCUAUCAGCCGGUUCA | 1069 |
| GGAUAUGAUGAUGAACUGG | 374 | GGAUAUGAUGAUGAACUGG | 374 | CCAGUUCAUCAUCAUAUCC | 1070 |
| GCUCUUUCUCUAUCUUCCU | 375 | GCUCUUUCUCUAUCUUCCU | 375 | AGGAAGAUAGAGAAAGAGC | 1071 |
| GGGGGCGACACUCCACCAU | 376 | GGGGGCGACACUCCACCAU | 376 | AUGGUGGAGUGUCGCCCCC | 1072 |
| GAUGAACCGGCUGAUAGCG | 377 | GAUGAACCGGCUGAUAGCG | 377 | CGCUAUCAGCCGGUUCAUC | 1073 |
| GAUAUGAUGAUGAACUGGU | 378 | GAUAUGAUGAUGAACUGGU | 378 | ACCAGUUCAUCAUCAUAUC | 1074 |
| UGGGAUAUGAUGAUGAACU | 379 | UGGGAUAUGAUGAUGAACU | 379 | AGUUCAUCAUCAUAUCCCA | 1075 |
| UUGCUCUUUCUCUAUCUUC | 380 | UUGCUCUUUCUCUAUCUUC | 380 | GAAGAUAGAGAAAGAGCAA | 1076 |
| UGGGGGCGACACUCCACCA | 381 | UGGGGGCGACACUCCACCA | 381 | UGGUGGAGUGUCGCCCCCA | 1077 |
| UGCUCUUUCUCUAUCUUCC | 382 | UGCUCUUUCUCUAUCUUCC | 382 | GGAAGAUAGAGAAAGAGCA | 1078 |
| GGUCCUUUCUUGGAUCAAC | 383 | GGUCCUUUCUUGGAUCAAC | 383 | GUUGAUCCAAGAAAGGACC | 1079 |
| AAGACUUCCGAGCGGUCGC | 384 | AAGACUUCCGAGCGGUCGC | 384 | GCGACCGCUCGGAAGUCUU | 1080 |
| AGCCCGGGUACCCUUGGCC | 385 | AGCCCGGGUACCCUUGGCC | 385 | GGCCAAGGGUACCCGGGCU | 1081 |
| UUUCUUGGAUCAACCCGCU | 386 | UUUCUUGGAUCAACCCGCU | 386 | AGCGGGUUGAUCCAAGAAA | 1082 |
| CAGCCCGGGUACCCUUGGC | 387 | CAGCCCGGGUACCCUUGGC | 387 | GCCAAGGGUACCCGGGCUG | 1083 |
| AGACUUCCGAGCGGUCGCA | 388 | AGACUUCCGAGCGGUCGCA | 388 | UGCGACCGCUCGGAAGUCU | 1084 |
| UUCUUGGAUCAACCCGCUC | 389 | UUCUUGGAUCAACCCGCUC | 389 | GAGCGGGUUGAUCCAAGAA | 1085 |
| CCCGGGUACCCUUGGCCCC | 390 | CCCGGGUACCCUUGGCCCC | 390 | GGGGCCAAGGGUACCCGGG | 1086 |
| GUCCUUUCUUGGAUCAACC | 391 | GUCCUUUCUUGGAUCAACC | 391 | GGUUGAUCCAAGAAAGGAC | 1087 |
| CUUUCUUGGAUCAACCCGC | 392 | CUUUCUUGGAUCAACCCGC | 392 | GCGGGUUGAUCCAAGAAAG | 1088 |
| CCUUUCUUGGAUCAACCCG | 393 | CCUUUCUUGGAUCAACCCG | 393 | CGGGUUGAUCCAAGAAAGG | 1089 |
| UCCUUUCUUGGAUCAACCC | 394 | UCCUUUCUUGGAUCAACCC | 394 | GGGUUGAUCCAAGAAAGGA | 1090 |
| AAGUUCCCGGGCGGUGGUC | 395 | AAGUUCCCGGGCGGUGGUC | 395 | GACCACCGCCCGGGAACUU | 1091 |
| GCAGUGGAUGAACCGGCUG | 396 | GCAGUGGAUGAACCGGCUG | 396 | CAGCCGGUUCAUCCACUGC | 1092 |
| CCGGGUACCCUUGGCCCCU | 397 | CCGGGUACCCUUGGCCCCU | 397 | AGGGGCCAAGGGUACCCGG | 1093 |
| AGUUCCCGGGCGGUGGUCA | 398 | AGUUCCCGGGCGGUGGUCA | 398 | UGACCACCGCCCGGGAACU | 1094 |
| CUUGGAUCAACCCGCUCAA | 399 | CUUGGAUCAACCCGCUCAA | 399 | UUGAGCGGGUUGAUCCAAG | 1095 |
| GGAUCAACCCGCUCAAUGC | 400 | GGAUCAACCCGCUCAAUGC | 400 | GCAUUGAGCGGGUUGAUCC | 1096 |
| ACUUCCGAGCGGUCGCAAC | 401 | ACUUCCGAGCGGUCGCAAC | 401 | GUUGCGACCGCUCGGAAGU | 1097 |
| UCUUGGAUCAACCCGCUCA | 402 | UCUUGGAUCAACCCGCUCA | 402 | UGAGCGGGUUGAUCCAAGA | 1098 |
| UUGGAUCAACCCGCUCAAU | 403 | UUGGAUCAACCCGCUCAAU | 403 | AUUGAGCGGGUUGAUCCAA | 1099 |
| AACCGCCGCCCACAGGACG | 404 | AACCGCCGCCCACAGGACG | 404 | CGUCCUGUGGGCGGCGGUU | 1100 |
| GCGUGAACUAUGCAACAGG | 405 | GCGUGAACUAUGCAACAGG | 405 | CCUGUUGCAUAGUUCACGC | 1101 |
| AUCAACCCGCUCAAUGCCU | 406 | AUCAACCCGCUCAAUGCCU | 406 | AGGCAUUGAGCGGGUUGAU | 1102 |
| GAUCAACCCGCUCAAUGCC | 407 | GAUCAACCCGCUCAAUGCC | 407 | GGCAUUGAGCGGGUUGAUC | 1103 |
| CAACCCGCUCAAUGCCUGG | 408 | CAACCCGCUCAAUGCCUGG | 408 | CCAGGCAUUGAGCGGGUUG | 1104 |
| GCUUCGCCGACCUCAUGGG | 409 | GCUUCGCCGACCUCAUGGG | 409 | CCCAUGAGGUCGGCGAAGC | 1105 |
| GACUUCCGAGCGGUCGCAA | 410 | GACUUCCGAGCGGUCGCAA | 410 | UUGCGACCGCUCGGAAGUC | 1106 |
| UCAACCCGCUCAAUGCCUG | 411 | UCAACCCGCUCAAUGCCUG | 411 | CAGGCAUUGAGCGGGUUGA | 1107 |
| GGCUUCGCCGACCUCAUGG | 412 | GGCUUCGCCGACCUCAUGG | 412 | CCAUGAGGUCGGCGAAGCC | 1108 |
| UGGAUCAACCCGCUCAAUG | 413 | UGGAUCAACCCGCUCAAUG | 413 | CAUUGAGCGGGUUGAUCCA | 1109 |
| CGGGCGGUGGUCAGAUCGU | 414 | CGGGCGGUGGUCAGAUCGU | 414 | ACGAUCUGACCACCGCCCG | 1110 |
| CUUGGCCCCUCUAUGGCAA | 415 | CUUGGCCCCUCUAUGGCAA | 415 | UUGCCAUAGAGGGGCCAAG | 1111 |
| CCGGGCGGUGGUCAGAUCG | 416 | CCGGGCGGUGGUCAGAUCG | 416 | CGAUCUGACCACCGCCCGG | 1112 |
| UGGGGUGGGCAGGAUGGCU | 417 | UGGGGUGGGCAGGAUGGCU | 417 | AGCCAUCCUGCCCACCCCA | 1113 |
| GGAGUUUACCUGUUGCCGC | 418 | GGAGUUUACCUGUUGCCGC | 418 | GCGGCAACAGGUAAACUCC | 1114 |
| CCUUGGCCCCUCUAUGGCA | 419 | CCUUGGCCCCUCUAUGGCA | 419 | UGCCAUAGAGGGGCCAAGG | 1115 |
| GUGGAGUUUACCUGUUGCC | 420 | GUGGAGUUUACCUGUUGCC | 420 | GGCAACAGGUAAACUCCAC | 1116 |
| GGUGGAGUUUACCUGUUGC | 421 | GGUGGAGUUUACCUGUUGC | 421 | GCAACAGGUAAACUCCACC | 1117 |
| UUCCCGGGCGGUGGUCAGA | 422 | UUCCCGGGCGGUGGUCAGA | 422 | UCUGACCACCGCCCGGGAA | 1118 |
| UGAACUAUGCAACAGGGAA | 423 | UGAACUAUGCAACAGGGAA | 423 | UUCCCUGUUGCAUAGUUCA | 1119 |
| AGUUUACCUGUUGCCGCGC | 424 | AGUUUACCUGUUGCCGCGC | 424 | GCGCGGCAACAGGUAAACU | 1120 |
| GUGAACUAUGCAACAGGGA | 425 | GUGAACUAUGCAACAGGGA | 425 | UCCCUGUUGCAUAGUUCAC | 1121 |
| UUACCUGUUGCCGCGCAGG | 426 | UUACCUGUUGCCGCGCAGG | 426 | CCUGCGCGGCAACAGGUAA | 1122 |
| UCCCGGGCGGUGGUCAGAU | 427 | UCCCGGGCGGUGGUCAGAU | 427 | AUCUGACCACCGCCCGGGA | 1123 |
| GUUCCCGGGCGGUGGUCAG | 428 | GUUCCCGGGCGGUGGUCAG | 428 | CUGACCACCGCCCGGGAAC | 1124 |
| GCCCGGGUACCCUUGGCCC | 429 | GCCCGGGUACCCUUGGCCC | 429 | GGGCCAAGGGUACCCGGGC | 1125 |
| AAGGAGAUGAAGGCGAAGG | 430 | AAGGAGAUGAAGGCGAAGG | 430 | CCUUCGCCUUCAUCUCCUU | 1126 |
| AGGAGAUGAAGGCGAAGGC | 431 | AGGAGAUGAAGGCGAAGGC | 431 | GCCUUCGCCUUCAUCUCCU | 1127 |
| GUUUACCUGUUGCCGCGCA | 432 | GUUUACCUGUUGCCGCGCA | 432 | UGCGCGGCAACAGGUAAAC | 1128 |
| CUGUUGCCGCGCAGGGGCC | 433 | CUGUUGCCGCGCAGGGGCC | 433 | GGCCCCUGCGCGGCAACAG | 1129 |
| AACACCAACCGCCGCCCAC | 434 | AACACCAACCGCCGCCCAC | 434 | GUGGGCGGCGGUUGGUGUU | 1130 |
| GAGUUUACCUGUUGCCGCG | 435 | GAGUUUACCUGUUGCCGCG | 435 | CGCGGCAACAGGUAAACUC | 1131 |
| UUUACCUGUUGCCGCGCAG | 436 | UUUACCUGUUGCCGCGCAG | 436 | CUGCGCGGCAACAGGUAAA | 1132 |
| GGGGUGGGCAGGAUGGCUC | 437 | GGGGUGGGCAGGAUGGCUC | 437 | GAGCCAUCCUGCCCACCCC | 1133 |
| GAAGACUUCCGAGCGGUCG | 438 | GAAGACUUCCGAGCGGUCG | 438 | CGACCGCUCGGAAGUCUUC | 1134 |
| ACCUGUUGCCGCGCAGGGG | 439 | ACCUGUUGCCGCGCAGGGG | 439 | CCCCUGCGCGGCAACAGGU | 1135 |
| UACCUGUUGCCGCGCAGGG | 440 | UACCUGUUGCCGCGCAGGG | 440 | CCCUGCGCGGCAACAGGUA | 1136 |
| UACCUCUUCAACUGGGCAG | 441 | UACCUCUUCAACUGGGCAG | 441 | CUGCCCAGUUGAAGAGGUA | 1137 |
| CGUGAACUAUGCAACAGGG | 442 | CGUGAACUAUGCAACAGGG | 442 | CCCUGUUGCAUAGUUCACG | 1138 |
| ACACCAACCGCCGCCCACA | 443 | ACACCAACCGCCGCCCACA | 443 | UGUGGGCGGCGGUUGGUGU | 1139 |
| CCCGGGCGGUGGUCAGAUC | 444 | CCCGGGCGGUGGUCAGAUC | 444 | GAUCUGACCACCGCCCGGG | 1140 |
| ACCUCUUCAACUGGGCAGU | 445 | ACCUCUUCAACUGGGCAGU | 445 | ACUGCCCAGUUGAAGAGGU | 1141 |
| CUUCGCCGACCUCAUGGGG | 446 | CUUCGCCGACCUCAUGGGG | 446 | CCCCAUGAGGUCGGCGAAG | 1142 |
| CCUGUUGCCGCGCAGGGGC | 447 | CCUGUUGCCGCGCAGGGGC | 447 | GCCCCUGCGCGGCAACAGG | 1143 |
| CCAACCGCCGCCCACAGGA | 448 | CCAACCGCCGCCCACAGGA | 448 | UCCUGUGGGCGGCGGUUGG | 1144 |
| ACCAACCGCCGCCCACAGG | 449 | ACCAACCGCCGCCCACAGG | 449 | CCUGUGGGCGGCGGUUGGU | 1145 |
| UGGAGUUUACCUGUUGCCG | 450 | UGGAGUUUACCUGUUGCCG | 450 | CGGCAACAGGUAAACUCCA | 1146 |
| CACCAACCGCCGCCCACAG | 451 | CACCAACCGCCGCCCACAG | 451 | CUGUGGGCGGCGGUUGGUG | 1147 |
| CAAACGUAACACCAACCGC | 452 | CAAACGUAACACCAACCGC | 452 | GCGGUUGGUGUUACGUUUG | 1148 |
| CAAGCGGAGACGGCUGGAG | 453 | CAAGCGGAGACGGCUGGAG | 453 | CUCCAGCCGUCUCCGCUUG | 1149 |
| ACGGAGGCUAUGACUAGGU | 454 | ACGGAGGCUAUGACUAGGU | 454 | ACCUAGUCAUAGCCUCCGU | 1150 |
| UAACACCAACCGCCGCCCA | 455 | UAACACCAACCGCCGCCCA | 455 | UGGGCGGCGGUUGGUGUUA | 1151 |
| AUCGUUGGUGGAGUUUACC | 456 | AUCGUUGGUGGAGUUUACC | 456 | GGUAAACUCCACCAACGAU | 1152 |
| GGGAGACAUAUAUCACAGC | 457 | GGGAGACAUAUAUCACAGC | 457 | GCUGUGAUAUAUGUCUCCC | 1153 |
| AACCUCGUGGAAGGCGACA | 458 | AACCUCGUGGAAGGCGACA | 458 | UGUCGCCUUCCACGAGGUU | 1154 |
| GGGGGAGACAUAUAUCACA | 459 | GGGGGAGACAUAUAUCACA | 459 | UGUGAUAUAUGUCUCCCCC | 1155 |
| AACGUAACACCAACCGCCG | 460 | AACGUAACACCAACCGCCG | 460 | CGGCGGUUGGUGUUACGUU | 1156 |
| AAACGUAACACCAACCGCC | 461 | AAACGUAACACCAACCGCC | 461 | GGCGGUUGGUGUUACGUUU | 1157 |
| GGGGAGACAUAUAUCACAG | 462 | GGGGAGACAUAUAUCACAG | 462 | CUGUGAUAUAUGUCUCCCC | 1158 |
| GAGAUGAAGGCGAAGGCGU | 463 | GAGAUGAAGGCGAAGGCGU | 463 | ACGCCUUCGCCUUCAUCUC | 1159 |
| AAGCGGAGACGGCUGGAGC | 464 | AAGCGGAGACGGCUGGAGC | 464 | GCUCCAGCCGUCUCCGCUU | 1160 |
| GUACCCUUGGCCCCUCUAU | 465 | GUACCCUUGGCCCCUCUAU | 465 | AUAGAGGGGCCAAGGGUAC | 1161 |
| CCUCCAGGACCCCCCCUCC | 466 | CCUCCAGGACCCCCCCUCC | 466 | GGAGGGGGGGUCCUGGAGG | 1162 |
| CUCCAGGACCCCCCCUCCC | 467 | CUCCAGGACCCCCCCUCCC | 467 | GGGAGGGGGGGUCCUGGAG | 1163 |
| UACCCUUGGCCCCUCUAUG | 468 | UACCCUUGGCCCCUCUAUG | 468 | CAUAGAGGGGCCAAGGGUA | 1164 |
| CAACCUCGUGGAAGGCGAC | 469 | CAACCUCGUGGAAGGCGAC | 469 | GUCGCCUUCCACGAGGUUG | 1165 |
| CGGAGGCUAUGACUAGGUA | 470 | CGGAGGCUAUGACUAGGUA | 470 | UACCUAGUCAUAGCCUCCG | 1166 |
| GGAGAUGAAGGCGAAGGCG | 471 | GGAGAUGAAGGCGAAGGCG | 471 | CGCCUUCGCCUUCAUCUCC | 1167 |
| AGAUGAAGGCGAAGGCGUC | 472 | AGAUGAAGGCGAAGGCGUC | 472 | GACGCCUUCGCCUUCAUCU | 1168 |
| GUAACACCAACCGCCGCCC | 473 | GUAACACCAACCGCCGCCC | 473 | GGGCGGCGGUUGGUGUUAC | 1169 |
| CGUAACACCAACCGCCGCC | 474 | CGUAACACCAACCGCCGCC | 474 | GGCGGCGGUUGGUGUUACG | 1170 |
| ACGUAACACCAACCGCCGC | 475 | ACGUAACACCAACCGCCGC | 475 | GCGGCGGUUGGUGUUACGU | 1171 |
| CACGGAGGCUAUGACUAGG | 476 | CACGGAGGCUAUGACUAGG | 476 | CCUAGUCAUAGCCUCCGUG | 1172 |
| GUUGGUGGAGUUUACCUGU | 477 | GUUGGUGGAGUUUACCUGU | 477 | ACAGGUAAACUCCACCAAC | 1173 |
| CGUUGGUGGAGUUUACCUG | 478 | CGUUGGUGGAGUUUACCUG | 478 | CAGGUAAACUCCACCAACG | 1174 |
| ACCCUUGGCCCCUCUAUGG | 479 | ACCCUUGGCCCCUCUAUGG | 479 | CCAUAGAGGGGCCAAGGGU | 1175 |
| UUGGUGGAGUUUACCUGUU | 480 | UUGGUGGAGUUUACCUGUU | 480 | AACAGGUAAACUCCACCAA | 1176 |
| UGGUGGAGUUUACCUGUUG | 481 | UGGUGGAGUUUACCUGUUG | 481 | CAACAGGUAAACUCCACCA | 1177 |
| UCGUUGGUGGAGUUUACCU | 482 | UCGUUGGUGGAGUUUACCU | 482 | AGGUAAACUCCACCAACGA | 1178 |
| CGGGUACCCUUGGCCCCUC | 483 | CGGGUACCCUUGGCCCCUC | 483 | GAGGGGCCAAGGGUACCCG | 1179 |
| GGCUCAGCCCGGGUACCCU | 484 | GGCUCAGCCCGGGUACCCU | 484 | AGGGUACCCGGGCUGAGCC | 1180 |
| GAUCACUCCCCUGUGAGGA | 485 | GAUCACUCCCCUGUGAGGA | 485 | UCCUCACAGGGGAGUGAUC | 1181 |
| GGUGGUCAGAUCGUUGGUG | 486 | GGUGGUCAGAUCGUUGGUG | 486 | CACCAACGAUCUGACCACC | 1182 |
| GAUGAAGGCGAAGGCGUCC | 487 | GAUGAAGGCGAAGGCGUCC | 487 | GGACGCCUUCGCCUUCAUC | 1183 |
| AGGAUGGCUCCUGUCACCC | 488 | AGGAUGGCUCCUGUCACCC | 488 | GGGUGACAGGAGCCAUCCU | 1184 |
| CUCAGCCCGGGUACCCUUG | 489 | CUCAGCCCGGGUACCCUUG | 489 | CAAGGGUACCCGGGCUGAG | 1185 |
| UCAGCCCGGGUACCCUUGG | 490 | UCAGCCCGGGUACCCUUGG | 490 | CCAAGGGUACCCGGGCUGA | 1186 |
| AUGAAGGCGAAGGCGUCCA | 491 | AUGAAGGCGAAGGCGUCCA | 491 | UGGACGCCUUCGCCUUCAU | 1187 |
| CGGGGGAGACAUAUAUCAC | 492 | CGGGGGAGACAUAUAUCAC | 492 | GUGAUAUAUGUCUCCCCCG | 1188 |
| CAGGAUGGCUCCUGUCACC | 493 | CAGGAUGGCUCCUGUCACC | 493 | GGUGACAGGAGCCAUCCUG | 1189 |
| UGAAGGCGAAGGCGUCCAC | 494 | UGAAGGCGAAGGCGUCCAC | 494 | GUGGACGCCUUCGCCUUCA | 1190 |
| UGGUCAGAUCGUUGGUGGA | 495 | UGGUCAGAUCGUUGGUGGA | 495 | UCCACCAACGAUCUGACCA | 1191 |
| GCUCAGCCCGGGUACCCUU | 496 | GCUCAGCCCGGGUACCCUU | 496 | AAGGGUACCCGGGCUGAGC | 1192 |
| GUGGUCAGAUCGUUGGUGG | 497 | GUGGUCAGAUCGUUGGUGG | 497 | CCACCAACGAUCUGACCAC | 1193 |
| CAGCCUCCAGGACCCCCCC | 498 | CAGCCUCCAGGACCCCCCC | 498 | GGGGGGGUCCUGGAGGCUG | 1194 |
| GGCGGUGGUCAGAUCGUUG | 499 | GGCGGUGGUCAGAUCGUUG | 499 | CAACGAUCUGACCACCGCC | 1195 |
| GCCUCCAGGACCCCCCCUC | 500 | GCCUCCAGGACCCCCCCUC | 500 | GAGGGGGGGUCCUGGAGGC | 1196 |
| AACCGGCUGAUAGCGUUCG | 501 | AACCGGCUGAUAGCGUUCG | 501 | CGAACGCUAUCAGCCGGUU | 1197 |
| AGCCUCCAGGACCCCCCCU | 502 | AGCCUCCAGGACCCCCCCU | 502 | AGGGGGGGUCCUGGAGGCU | 1198 |
| CGGCUUCGCCGACCUCAUG | 503 | CGGCUUCGCCGACCUCAUG | 503 | CAUGAGGUCGGCGAAGCCG | 1199 |
| GCGGAGACGGCUGGAGCGC | 504 | GCGGAGACGGCUGGAGCGC | 504 | GCGCUCCAGCCGUCUCCGC | 1200 |
| UCAUGGGGUACAUUCCGCU | 505 | UCAUGGGGUACAUUCCGCU | 505 | AGCGGAAUGUACCCCAUGA | 1201 |
| GAACCGGCUGAUAGCGUUC | 506 | GAACCGGCUGAUAGCGUUC | 506 | GAACGCUAUCAGCCGGUUC | 1202 |
| GCGGUGGUCAGAUCGUUGG | 507 | GCGGUGGUCAGAUCGUUGG | 507 | CCAACGAUCUGACCACCGC | 1203 |
| GGCAGGAUGGCUCCUGUCA | 508 | GGCAGGAUGGCUCCUGUCA | 508 | UGACAGGAGCCAUCCUGCC | 1204 |
| GCAGGAUGGCUCCUGUCAC | 509 | GCAGGAUGGCUCCUGUCAC | 509 | GUGACAGGAGCCAUCCUGC | 1205 |
| AUUUGGGUAAGGUCAUCGA | 510 | AUUUGGGUAAGGUCAUCGA | 510 | UCGAUGACCUUACCCAAAU | 1206 |
| ACCGGCUGAUAGCGUUCGC | 511 | ACCGGCUGAUAGCGUUCGC | 511 | GCGAACGCUAUCAGCCGGU | 1207 |
| CGGAGACGGCUGGAGCGCG | 512 | CGGAGACGGCUGGAGCGCG | 512 | CGCGCUCCAGCCGUCUCCG | 1208 |
| GCGGCUUCGCCGACCUCAU | 513 | GCGGCUUCGCCGACCUCAU | 513 | AUGAGGUCGGCGAAGCCGC | 1209 |
| AAUUUGGGUAAGGUCAUCG | 514 | AAUUUGGGUAAGGUCAUCG | 514 | CGAUGACCUUACCCAAAUU | 1210 |
| GGGCGGUGGUCAGAUCGUU | 515 | GGGCGGUGGUCAGAUCGUU | 515 | AACGAUCUGACCACCGCCC | 1211 |
| CAACCGCCGCCCACAGGAC | 516 | CAACCGCCGCCCACAGGAC | 516 | GUCCUGUGGGCGGCGGUUG | 1212 |
| UGCGGCUUCGCCGACCUCA | 517 | UGCGGCUUCGCCGACCUCA | 517 | UGAGGUCGGCGAAGCCGCA | 1213 |
| CGGUGGUCAGAUCGUUGGU | 518 | CGGUGGUCAGAUCGUUGGU | 518 | ACCAACGAUCUGACCACCG | 1214 |
| UUGGGUGUGCGCGCGACUA | 519 | UUGGGUGUGCGCGCGACUA | 519 | UAGUCGCGCGCACACCCAA | 1215 |
| GUGUGCGCGCGACUAGGAA | 520 | GUGUGCGCGCGACUAGGAA | 520 | UUCCUAGUCGCGCGCACAC | 1216 |
| GAUGGCUCCUGUCACCCCG | 521 | GAUGGCUCCUGUCACCCCG | 521 | CGGGGUGACAGGAGCCAUC | 1217 |
| GGAUGGCUCCUGUCACCCC | 522 | GGAUGGCUCCUGUCACCCC | 522 | GGGGUGACAGGAGCCAUCC | 1218 |
| UGUGCGCGCGACUAGGAAG | 523 | UGUGCGCGCGACUAGGAAG | 523 | CUUCCUAGUCGCGCGCACA | 1219 |
| UGGGUGUGCGCGCGACUAG | 524 | UGGGUGUGCGCGCGACUAG | 524 | CUAGUCGCGCGCACACCCA | 1220 |
| GGUGUGCGCGCGACUAGGA | 525 | GGUGUGCGCGCGACUAGGA | 525 | UCCUAGUCGCGCGCACACC | 1221 |
| GGGUGUGCGCGCGACUAGG | 526 | GGGUGUGCGCGCGACUAGG | 526 | CCUAGUCGCGCGCACACCC | 1222 |
| CCCCGGCGUAGGUCGCGUA | 527 | CCCCGGCGUAGGUCGCGUA | 527 | UACGCGACCUACGCCGGGG | 1223 |
| GAAGGCGACAACCUAUCCC | 528 | GAAGGCGACAACCUAUCCC | 528 | GGGAUAGGUUGUCGCCUUC | 1224 |
| CCCGGCGUAGGUCGCGUAA | 529 | CCCGGCGUAGGUCGCGUAA | 529 | UUACGCGACCUACGCCGGG | 1225 |
| AGCGGAGACGGCUGGAGCG | 530 | AGCGGAGACGGCUGGAGCG | 530 | CGCUCCAGCCGUCUCCGCU | 1226 |
| CCCCCGGCGUAGGUCGCGU | 531 | CCCCCGGCGUAGGUCGCGU | 531 | ACGCGACCUACGCCGGGGG | 1227 |
| AGGCGAAGGCGUCCACAGU | 532 | AGGCGAAGGCGUCCACAGU | 532 | ACUGUGGACGCCUUCGCCU | 1228 |
| AAGGCGAAGGCGUCCACAG | 533 | AAGGCGAAGGCGUCCACAG | 533 | CUGUGGACGCCUUCGCCUU | 1229 |
| GUUGGGUGUGCGCGCGACU | 534 | GUUGGGUGUGCGCGCGACU | 534 | AGUCGCGCGCACACCCAAC | 1230 |
| CUCAUGGGGUACAUUCCGC | 535 | CUCAUGGGGUACAUUCCGC | 535 | GCGGAAUGUACCCCAUGAG | 1231 |
| GGAAGGCGACAACCUAUCC | 536 | GGAAGGCGACAACCUAUCC | 536 | GGAUAGGUUGUCGCCUUCC | 1232 |
| GCAAGUUCCUUGCCGACGG | 537 | GCAAGUUCCUUGCCGACGG | 537 | CCGUCGGCAAGGAACUUGC | 1233 |
| UGCAGCCUCCAGGACCCCC | 538 | UGCAGCCUCCAGGACCCCC | 538 | GGGGGUCCUGGAGGCUGCA | 1234 |
| GGACUGCACGAUGCUCGUG | 539 | GGACUGCACGAUGCUCGUG | 539 | CACGAGCAUCGUGCAGUCC | 1235 |
| GAAGGCGAAGGCGUCCACA | 540 | GAAGGCGAAGGCGUCCACA | 540 | UGUGGACGCCUUCGCCUUC | 1236 |
| GCAACCUCGUGGAAGGCGA | 541 | GCAACCUCGUGGAAGGCGA | 541 | UCGCCUUCCACGAGGUUGC | 1237 |
| GACGCGGGCUGUGCUUGGU | 542 | GACGCGGGCUGUGCUUGGU | 542 | ACCAAGCACAGCCCGCGUC | 1238 |
| ACGCGGGCUGUGCUUGGUA | 543 | ACGCGGGCUGUGCUUGGUA | 543 | UACCAAGCACAGCCCGCGU | 1239 |
| GUGCAGCCUCCAGGACCCC | 544 | GUGCAGCCUCCAGGACCCC | 544 | GGGGUCCUGGAGGCUGCAC | 1240 |
| GCAGCCUCCAGGACCCCCC | 545 | GCAGCCUCCAGGACCCCCC | 545 | GGGGGGUCCUGGAGGCUGC | 1241 |
| CGCAACCUCGUGGAAGGCG | 546 | CGCAACCUCGUGGAAGGCG | 546 | CGCCUUCCACGAGGUUGCG | 1242 |
| UGUCGUGCAGCCUCCAGGA | 547 | UGUCGUGCAGCCUCCAGGA | 547 | UCCUGGAGGCUGCACGACA | 1243 |
| AUGGCUUGGGAUAUGAUGA | 548 | AUGGCUUGGGAUAUGAUGA | 548 | UCAUCAUAUCCCAAGCCAU | 1244 |
| CUUGGGAUAUGAUGAUGAA | 549 | CUUGGGAUAUGAUGAUGAA | 549 | UUCAUCAUCAUAUCCCAAG | 1245 |
| CCCUUGGCCCCUCUAUGGC | 550 | CCCUUGGCCCCUCUAUGGC | 550 | GCCAUAGAGGGGCCAAGGG | 1246 |
| UGGCUUGGGAUAUGAUGAU | 551 | UGGCUUGGGAUAUGAUGAU | 551 | AUCAUCAUAUCCCAAGCCA | 1247 |
| CUGUGCAGUGGAUGAACCG | 552 | CUGUGCAGUGGAUGAACCG | 552 | CGGUUCAUCCACUGCACAG | 1248 |
| AUGACGCGGGCUGUGCUUG | 553 | AUGACGCGGGCUGUGCUUG | 553 | CAAGCACAGCCCGCGUCAU | 1249 |
| GCUUGGGAUAUGAUGAUGA | 554 | GCUUGGGAUAUGAUGAUGA | 554 | UCAUCAUCAUAUCCCAAGC | 1250 |
| UAUGACGCGGGCUGUGCUU | 555 | UAUGACGCGGGCUGUGCUU | 555 | AAGCACAGCCCGCGUCAUA | 1251 |
| UGACGCGGGCUGUGCUUGG | 556 | UGACGCGGGCUGUGCUUGG | 556 | CCAAGCACAGCCCGCGUCA | 1252 |
| GGCUUGGGAUAUGAUGAUG | 557 | GGCUUGGGAUAUGAUGAUG | 557 | CAUCAUCAUAUCCCAAGCC | 1253 |
| UGUGCAGUGGAUGAACCGG | 558 | UGUGCAGUGGAUGAACCGG | 558 | CCGGUUCAUCCACUGCACA | 1254 |
| GCUGUGCAGUGGAUGAACC | 559 | GCUGUGCAGUGGAUGAACC | 559 | GGUUCAUCCACUGCACAGC | 1255 |
| CUCUUCAACUGGGCAGUAA | 560 | CUCUUCAACUGGGCAGUAA | 560 | UUACUGCCCAGUUGAAGAG | 1256 |
| CCUCGUGGAAGGCGACAAC | 561 | CCUCGUGGAAGGCGACAAC | 561 | GUUGUCGCCUUCCACGAGG | 1257 |
| UGUGUCACCCAGACAGUCG | 562 | UGUGUCACCCAGACAGUCG | 562 | CGACUGUCUGGGUGACACA | 1258 |
| GGCGUGAACUAUGCAACAG | 563 | GGCGUGAACUAUGCAACAG | 563 | CUGUUGCAUAGUUCACGCC | 1259 |
| CGGCGUGAACUAUGCAACA | 564 | CGGCGUGAACUAUGCAACA | 564 | UGUUGCAUAGUUCACGCCG | 1260 |
| GUGUCACCCAGACAGUCGA | 565 | GUGUCACCCAGACAGUCGA | 565 | UCGACUGUCUGGGUGACAC | 1261 |
| CCUCUUCAACUGGGCAGUA | 566 | CCUCUUCAACUGGGCAGUA | 566 | UACUGCCCAGUUGAAGAGG | 1262 |
| CGUGGAAGGCGACAACCUA | 567 | CGUGGAAGGCGACAACCUA | 567 | UAGGUUGUCGCCUUCCACG | 1263 |
| UCGUGGAAGGCGACAACCU | 568 | UCGUGGAAGGCGACAACCU | 568 | AGGUUGUCGCCUUCCACGA | 1264 |
| CGGCCUAGUUGGGGCCCCA | 569 | CGGCCUAGUUGGGGCCCCA | 569 | UGGGGCCCCAACUAGGCCG | 1265 |
| CGACUAGGAAGACUUCCGA | 570 | CGACUAGGAAGACUUCCGA | 570 | UCGGAAGUCUUCCUAGUCG | 1266 |
| UUUGGGUAAGGUCAUCGAU | 571 | UUUGGGUAAGGUCAUCGAU | 571 | AUCGAUGACCUUACCCAAA | 1267 |
| GUGGAAGGCGACAACCUAU | 572 | GUGGAAGGCGACAACCUAU | 572 | AUAGGUUGUCGCCUUCCAC | 1268 |
| ACCUCGUGGAAGGCGACAA | 573 | ACCUCGUGGAAGGCGACAA | 573 | UUGUCGCCUUCCACGAGGU | 1269 |
| GCGACUAGGAAGACUUCCG | 574 | GCGACUAGGAAGACUUCCG | 574 | CGGAAGUCUUCCUAGUCGC | 1270 |
| GUCGUGCAGCCUCCAGGAC | 575 | GUCGUGCAGCCUCCAGGAC | 575 | GUCCUGGAGGCUGCACGAC | 1271 |
| UAGGAAGACUUCCGAGCGG | 576 | UAGGAAGACUUCCGAGCGG | 576 | CCGCUCGGAAGUCUUCCUA | 1272 |
| ACGGCGUGAACUAUGCAAC | 577 | ACGGCGUGAACUAUGCAAC | 577 | GUUGCAUAGUUCACGCCGU | 1273 |
| CUCGUGGAAGGCGACAACC | 578 | CUCGUGGAAGGCGACAACC | 578 | GGUUGUCGCCUUCCACGAG | 1274 |
| GGUCGCAACCUCGUGGAAG | 579 | GGUCGCAACCUCGUGGAAG | 579 | CUUCCACGAGGUUGCGACC | 1275 |
| CGGUCGCAACCUCGUGGAA | 580 | CGGUCGCAACCUCGUGGAA | 580 | UUCCACGAGGUUGCGACCG | 1276 |
| GCGCGCGACUAGGAAGACU | 581 | GCGCGCGACUAGGAAGACU | 581 | AGUCUUCCUAGUCGCGCGC | 1277 |
| GACGGCGUGAACUAUGCAA | 582 | GACGGCGUGAACUAUGCAA | 582 | UUGCAUAGUUCACGCCGUC | 1278 |
| UAGAUCACUCCCCUGUGAG | 583 | UAGAUCACUCCCCUGUGAG | 583 | CUCACAGGGGAGUGAUCUA | 1279 |
| AGCGGUCGCAACCUCGUGG | 584 | AGCGGUCGCAACCUCGUGG | 584 | CCACGAGGUUGCGACCGCU | 1280 |
| UGGAAGGCGACAACCUAUC | 585 | UGGAAGGCGACAACCUAUC | 585 | GAUAGGUUGUCGCCUUCCA | 1281 |
| CGCGCGACUAGGAAGACUU | 586 | CGCGCGACUAGGAAGACUU | 586 | AAGUCUUCCUAGUCGCGCG | 1282 |
| CUAGGAAGACUUCCGAGCG | 587 | CUAGGAAGACUUCCGAGCG | 587 | CGCUCGGAAGUCUUCCUAG | 1283 |
| GUGCGCGCGACUAGGAAGA | 588 | GUGCGCGCGACUAGGAAGA | 588 | UCUUCCUAGUCGCGCGCAC | 1284 |
| AGAUCACUCCCCUGUGAGG | 589 | AGAUCACUCCCCUGUGAGG | 589 | CCUCACAGGGGAGUGAUCU | 1285 |
| UGCGCGCGACUAGGAAGAC | 590 | UGCGCGCGACUAGGAAGAC | 590 | GUCUUCCUAGUCGCGCGCA | 1286 |
| AUAGAUCACUCCCCUGUGA | 591 | AUAGAUCACUCCCCUGUGA | 591 | UCACAGGGGAGUGAUCUAU | 1287 |
| GAGCGGUCGCAACCUCGUG | 592 | GAGCGGUCGCAACCUCGUG | 592 | CACGAGGUUGCGACCGCUC | 1288 |
| CACGAACGACUGCUCCAAC | 593 | CACGAACGACUGCUCCAAC | 593 | GUUGGAGCAGUCGUUCGUG | 1289 |
| GGCAAGUUCCUUGCCGACG | 594 | GGCAAGUUCCUUGCCGACG | 594 | CGUCGGCAAGGAACUUGCC | 1290 |
| UCGUGCAGCCUCCAGGACC | 595 | UCGUGCAGCCUCCAGGACC | 595 | GGUCCUGGAGGCUGCACGA | 1291 |
| GUCACGAACGACUGCUCCA | 596 | GUCACGAACGACUGCUCCA | 596 | UGGAGCAGUCGUUCGUGAC | 1292 |
| GCGGUCGCAACCUCGUGGA | 597 | GCGGUCGCAACCUCGUGGA | 597 | UCCACGAGGUUGCGACCGC | 1293 |
| GCGCGACUAGGAAGACUUC | 598 | GCGCGACUAGGAAGACUUC | 598 | GAAGUCUUCCUAGUCGCGC | 1294 |
| GCUAUGACGCGGGCUGUGC | 599 | GCUAUGACGCGGGCUGUGC | 599 | GCACAGCCCGCGUCAUAGC | 1295 |
| UCACGAACGACUGCUCCAA | 600 | UCACGAACGACUGCUCCAA | 600 | UUGGAGCAGUCGUUCGUGA | 1296 |
| UCGCAACCUCGUGGAAGGC | 601 | UCGCAACCUCGUGGAAGGC | 601 | GCCUUCCACGAGGUUGCGA | 1297 |
| CGUGCAGCCUCCAGGACCC | 602 | CGUGCAGCCUCCAGGACCC | 602 | GGGUCCUGGAGGCUGCACG | 1298 |
| GUCGCAACCUCGUGGAAGG | 603 | GUCGCAACCUCGUGGAAGG | 603 | CCUUCCACGAGGUUGCGAC | 1299 |
| ACUAGGAAGACUUCCGAGC | 604 | ACUAGGAAGACUUCCGAGC | 604 | GCUCGGAAGUCUUCCUAGU | 1300 |
| CGCGACUAGGAAGACUUCC | 605 | CGCGACUAGGAAGACUUCC | 605 | GGAAGUCUUCCUAGUCGCG | 1301 |
| UGGGCGAAGCACAUGUGGA | 606 | UGGGCGAAGCACAUGUGGA | 606 | UCCACAUGUGCUUCGCCCA | 1302 |
| CCUUGCCUACUAUUCCAUG | 607 | CCUUGCCUACUAUUCCAUG | 607 | CAUGGAAUAGUAGGCAAGG | 1303 |
| GCCUCAGGAAACUUGGGGU | 608 | GCCUCAGGAAACUUGGGGU | 608 | ACCCCAAGUUUCCUGAGGC | 1304 |
| UGCUAUGACGCGGGCUGUG | 609 | UGCUAUGACGCGGGCUGUG | 609 | CACAGCCCGCGUCAUAGCA | 1305 |
| UCGUGCUCGCCACCGCUAC | 610 | UCGUGCUCGCCACCGCUAC | 610 | GUAGCGGUGGCGAGCACGA | 1306 |
| UGCCUCAGGAAACUUGGGG | 611 | UGCCUCAGGAAACUUGGGG | 611 | CCCCAAGUUUCCUGAGGCA | 1307 |
| UGUCUCGUGCCCGACCCCG | 612 | UGUCUCGUGCCCGACCCCG | 612 | CGGGGUCGGGCACGAGACA | 1308 |
| UGUGGCGGCAGGAGAUGGG | 613 | UGUGGCGGCAGGAGAUGGG | 613 | CCCAUCUCCUGCCGCCACA | 1309 |
| GUCGUGCUCGCCACCGCUA | 614 | GUCGUGCUCGCCACCGCUA | 614 | UAGCGGUGGCGAGCACGAC | 1310 |
| GAUUUCCACUACGUGACGG | 615 | GAUUUCCACUACGUGACGG | 615 | CCGUCACGUAGUGGAAAUC | 1311 |
| GGGCCUUGCCUACUAUUCC | 616 | GGGCCUUGCCUACUAUUCC | 616 | GGAAUAGUAGGCAAGGCCC | 1312 |
| GCCUUGCCUACUAUUCCAU | 617 | GCCUUGCCUACUAUUCCAU | 617 | AUGGAAUAGUAGGCAAGGC | 1313 |
| GACUAGGAAGACUUCCGAG | 618 | GACUAGGAAGACUUCCGAG | 618 | CUCGGAAGUCUUCCUAGUC | 1314 |
| GCGGGGGAGACAUAUAUCA | 619 | GCGGGGGAGACAUAUAUCA | 619 | UGAUAUAUGUCUCCCCCGC | 1315 |
| CGAGCGGUCGCAACCUCGU | 620 | CGAGCGGUCGCAACCUCGU | 620 | ACGAGGUUGCGACCGCUCG | 1316 |
| GGCCUUGCCUACUAUUCCA | 621 | GGCCUUGCCUACUAUUCCA | 621 | UGGAAUAGUAGGCAAGGCC | 1317 |
| AUUUCCACUACGUGACGGG | 622 | AUUUCCACUACGUGACGGG | 622 | CCCGUCACGUAGUGGAAAU | 1318 |
| GGACGUCAAGUUCCCGGGC | 623 | GGACGUCAAGUUCCCGGGC | 623 | GCCCGGGAACUUGACGUCC | 1319 |
| GAGUGCUAUGACGCGGGCU | 624 | GAGUGCUAUGACGCGGGCU | 624 | AGCCCGCGUCAUAGCACUC | 1320 |
| GACGUCAAGUUCCCGGGCG | 625 | GACGUCAAGUUCCCGGGCG | 625 | CGCCCGGGAACUUGACGUC | 1321 |
| UCAGCGACGGGUCUUGGUC | 626 | UCAGCGACGGGUCUUGGUC | 626 | GACCAAGACCCGUCGCUGA | 1322 |
| UCAAGUUCCCGGGCGGUGG | 627 | UCAAGUUCCCGGGCGGUGG | 627 | CCACCGCCCGGGAACUUGA | 1323 |
| UCAAGGAGAUGAAGGCGAA | 628 | UCAAGGAGAUGAAGGCGAA | 628 | UUCGCCUUCAUCUCCUUGA | 1324 |
| CCUAUCCCCAAGGCUCGCC | 629 | CCUAUCCCCAAGGCUCGCC | 629 | GGCGAGCCUUGGGGAUAGG | 1325 |
| CUUGACCUACCUCAGAUCA | 630 | CUUGACCUACCUCAGAUCA | 630 | UGAUCUGAGGUAGGUCAAG | 1326 |
| UUUCCACUACGUGACGGGC | 631 | UUUCCACUACGUGACGGGC | 631 | GCCCGUCACGUAGUGGAAA | 1327 |
| AGUGCUAUGACGCGGGCUG | 632 | AGUGCUAUGACGCGGGCUG | 632 | CAGCCCGCGUCAUAGCACU | 1328 |
| ACGUCAAGUUCCCGGGCGG | 633 | ACGUCAAGUUCCCGGGCGG | 633 | CCGCCCGGGAACUUGACGU | 1329 |
| UCUGGAGACAUCGGGCCAG | 634 | UCUGGAGACAUCGGGCCAG | 634 | CUGGCCCGAUGUCUCCAGA | 1330 |
| GGGCGAAGCACAUGUGGAA | 635 | GGGCGAAGCACAUGUGGAA | 635 | UUCCACAUGUGCUUCGCCC | 1331 |
| UUGACCUACCUCAGAUCAU | 636 | UUGACCUACCUCAGAUCAU | 636 | AUGAUCUGAGGUAGGUCAA | 1332 |
| CCAAGCGGAGACGGCUGGA | 637 | CCAAGCGGAGACGGCUGGA | 637 | UCCAGCCGUCUCCGCUUGG | 1333 |
| ACCAAGCGGAGACGGCUGG | 638 | ACCAAGCGGAGACGGCUGG | 638 | CCAGCCGUCUCCGCUUGGU | 1334 |
| GGGUGGCUUCAUGCCUCAG | 639 | GGGUGGCUUCAUGCCUCAG | 639 | CUGAGGCAUGAAGCCACCC | 1335 |
| GUCAAGUUCCCGGGCGGUG | 640 | GUCAAGUUCCCGGGCGGUG | 640 | CACCGCCCGGGAACUUGAC | 1336 |
| CUCAAGGAGAUGAAGGCGA | 641 | CUCAAGGAGAUGAAGGCGA | 641 | UCGCCUUCAUCUCCUUGAG | 1337 |
| GACCAAGCGGAGACGGCUG | 642 | GACCAAGCGGAGACGGCUG | 642 | CAGCCGUCUCCGCUUGGUC | 1338 |
| UCCAGGUCGGGCUCAACCA | 643 | UCCAGGUCGGGCUCAACCA | 643 | UGGUUGAGCCCGACCUGGA | 1339 |
| CUCUUUCUCUAUCUUCCUC | 644 | CUCUUUCUCUAUCUUCCUC | 644 | GAGGAAGAUAGAGAAAGAG | 1340 |
| GUCUGGAGACAUCGGGCCA | 645 | GUCUGGAGACAUCGGGCCA | 645 | UGGCCCGAUGUCUCCAGAC | 1341 |
| GUUGUGACUUGGCCCCCGA | 646 | GUUGUGACUUGGCCCCCGA | 646 | UCGGGGGCCAAGUCACAAC | 1342 |
| AGACCUGGCUCCAGUCCAA | 647 | AGACCUGGCUCCAGUCCAA | 647 | UUGGACUGGAGCCAGGUCU | 1343 |
| CUUGCCUACUAUUCCAUGG | 648 | CUUGCCUACUAUUCCAUGG | 648 | CCAUGGAAUAGUAGGCAAG | 1344 |
| CCCGGUUGCUCUUUCUCUA | 649 | CCCGGUUGCUCUUUCUCUA | 649 | UAGAGAAAGAGCAACCGGG | 1345 |
| CUUUCUCUAUCUUCCUCUU | 650 | CUUUCUCUAUCUUCCUCUU | 650 | AAGAGGAAGAUAGAGAAAG | 1346 |
| AGGGUGGCUUCAUGCCUCA | 651 | AGGGUGGCUUCAUGCCUCA | 651 | UGAGGCAUGAAGCCACCCU | 1347 |
| AAGACCUGGCUCCAGUCCA | 652 | AAGACCUGGCUCCAGUCCA | 652 | UGGACUGGAGCCAGGUCUU | 1348 |
| CCGGUUGCUCUUUCUCUAU | 653 | CCGGUUGCUCUUUCUCUAU | 653 | AUAGAGAAAGAGCAACCGG | 1349 |
| CGGUUGCUCUUUCUCUAUC | 654 | CGGUUGCUCUUUCUCUAUC | 654 | GAUAGAGAAAGAGCAACCG | 1350 |
| UGGGGGAUUUCCACUACGU | 655 | UGGGGGAUUUCCACUACGU | 655 | ACGUAGUGGAAAUCCCCCA | 1351 |
| AUGUCACGAACGACUGCUC | 656 | AUGUCACGAACGACUGCUC | 656 | GAGCAGUCGUUCGUGACAU | 1352 |
| GGCCUAGUUGGGGCCCCAC | 657 | GGCCUAGUUGGGGCCCCAC | 657 | GUGGGGCCCCAACUAGGCC | 1353 |
| UGGACCAAGCGGAGACGGC | 658 | UGGACCAAGCGGAGACGGC | 658 | GCCGUCUCCGCUUGGUCCA | 1354 |
| UUCCAGGUCGGGCUCAACC | 659 | UUCCAGGUCGGGCUCAACC | 659 | GGUUGAGCCCGACCUGGAA | 1355 |
| AGCGGGUCGAGUUCCUGGU | 660 | AGCGGGUCGAGUUCCUGGU | 660 | ACCAGGAACUCGACCCGCU | 1356 |
| CAAGGAGAUGAAGGCGAAG | 661 | CAAGGAGAUGAAGGCGAAG | 661 | CUUCGCCUUCAUCUCCUUG | 1357 |
| CAUGUCACGAACGACUGCU | 662 | CAUGUCACGAACGACUGCU | 662 | AGCAGUCGUUCGUGACAUG | 1358 |
| CAGCGGGUCGAGUUCCUGG | 663 | CAGCGGGUCGAGUUCCUGG | 663 | CCAGGAACUCGACCCGCUG | 1359 |
| UUCCACUACGUGACGGGCA | 664 | UUCCACUACGUGACGGGCA | 664 | UGCCCGUCACGUAGUGGAA | 1360 |
| UAGGGUGGCUUCAUGCCUC | 665 | UAGGGUGGCUUCAUGCCUC | 665 | GAGGCAUGAAGCCACCCUA | 1361 |
| UCCAGGACUGCACGAUGCU | 666 | UCCAGGACUGCACGAUGCU | 666 | AGCAUCGUGCAGUCCUGGA | 1362 |
| UCCACUACGUGACGGGCAU | 667 | UCCACUACGUGACGGGCAU | 667 | AUGCCCGUCACGUAGUGGA | 1363 |
| AAUAGGGUGGCUUCAUGCC | 668 | AAUAGGGUGGCUUCAUGCC | 668 | GGCAUGAAGCCACCCUAUU | 1364 |
| GUCUUCACGGAGGCUAUGA | 669 | GUCUUCACGGAGGCUAUGA | 669 | UCAUAGCCUCCGUGAAGAC | 1365 |
| AUAGGGUGGCUUCAUGCCU | 670 | AUAGGGUGGCUUCAUGCCU | 670 | AGGCAUGAAGCCACCCUAU | 1366 |
| UCUUCACGGAGGCUAUGAC | 671 | UCUUCACGGAGGCUAUGAC | 671 | GUCAUAGCCUCCGUGAAGA | 1367 |
| AUGCCUCAGGAAACUUGGG | 672 | AUGCCUCAGGAAACUUGGG | 672 | CCCAAGUUUCCUGAGGCAU | 1368 |
| ACCGGGACGUGCUCAAGGA | 673 | ACCGGGACGUGCUCAAGGA | 673 | UCCUUGAGCACGUCCCGGU | 1369 |
| GGGGCUGUGCAGUGGAUGA | 674 | GGGGCUGUGCAGUGGAUGA | 674 | UCAUCCACUGCACAGCCCC | 1370 |
| AAGCUCCAGGACUGCACGA | 675 | AAGCUCCAGGACUGCACGA | 675 | UCGUGCAGUCCUGGAGCUU | 1371 |
| GCUCCAGGACUGCACGAUG | 676 | GCUCCAGGACUGCACGAUG | 676 | CAUCGUGCAGUCCUGGAGC | 1372 |
| UACCGGGACGUGCUCAAGG | 677 | UACCGGGACGUGCUCAAGG | 677 | CCUUGAGCACGUCCCGGUA | 1373 |
| GGGCUGUGCAGUGGAUGAA | 678 | GGGCUGUGCAGUGGAUGAA | 678 | UUCAUCCACUGCACAGCCC | 1374 |
| CGUCAAGUUCCCGGGCGGU | 679 | CGUCAAGUUCCCGGGCGGU | 679 | ACCGCCCGGGAACUUGACG | 1375 |
| UCAAUAGGGUGGCUUCAUG | 680 | UCAAUAGGGUGGCUUCAUG | 680 | CAUGAAGCCACCCUAUUGA | 1376 |
| AGUCUUCACGGAGGCUAUG | 681 | AGUCUUCACGGAGGCUAUG | 681 | CAUAGCCUCCGUGAAGACU | 1377 |
| GGACCAAGCGGAGACGGCU | 682 | GGACCAAGCGGAGACGGCU | 682 | AGCCGUCUCCGCUUGGUCC | 1378 |
| GGCUCCAGUCCAAGCUCCU | 683 | GGCUCCAGUCCAAGCUCCU | 683 | AGGAGCUUGGACUGGAGCC | 1379 |
| GGCUGUGCAGUGGAUGAAC | 684 | GGCUGUGCAGUGGAUGAAC | 684 | GUUCAUCCACUGCACAGCC | 1380 |
| CUCCAGGACUGCACGAUGC | 685 | CUCCAGGACUGCACGAUGC | 685 | GCAUCGUGCAGUCCUGGAG | 1381 |
| GAGUCUUCACGGAGGCUAU | 686 | GAGUCUUCACGGAGGCUAU | 686 | AUAGCCUCCGUGAAGACUC | 1382 |
| UGGCUCCAGUCCAAGCUCC | 687 | UGGCUCCAGUCCAAGCUCC | 687 | GGAGCUUGGACUGGAGCCA | 1383 |
| GGGGAUUUCCACUACGUGA | 688 | GGGGAUUUCCACUACGUGA | 688 | UCACGUAGUGGAAAUCCCC | 1384 |
| CAUGCCUCAGGAAACUUGG | 689 | CAUGCCUCAGGAAACUUGG | 689 | CCAAGUUUCCUGAGGCAUG | 1385 |
| AUCAAUAGGGUGGCUUCAU | 690 | AUCAAUAGGGUGGCUUCAU | 690 | AUGAAGCCACCCUAUUGAU | 1386 |
| GCGGGCCUUGCCUACUAUU | 691 | GCGGGCCUUGCCUACUAUU | 691 | AAUAGUAGGCAAGGCCCGC | 1387 |
| CCGGGACGUGCUCAAGGAG | 692 | CCGGGACGUGCUCAAGGAG | 692 | CUCCUUGAGCACGUCCCGG | 1388 |
| CCAUGGUGGGGAACUGGGC | 693 | CCAUGGUGGGGAACUGGGC | 693 | GCCCAGUUCCCCACCAUGG | 1389 |
| CAAUAGGGUGGCUUCAUGC | 694 | CAAUAGGGUGGCUUCAUGC | 694 | GCAUGAAGCCACCCUAUUG | 1390 |
| AGCUCCAGGACUGCACGAU | 695 | AGCUCCAGGACUGCACGAU | 695 | AUCGUGCAGUCCUGGAGCU | 1391 |
| CGGGCCUUGCCUACUAUUC | 696 | CGGGCCUUGCCUACUAUUC | 696 | GAAUAGUAGGCAAGGCCCG | 1392 |
| The 3′-ends of the Upper sequence and the Lower sequence of the siNA construct can include an overhang sequence, for example about 1, 2, 3, or 4 nucleotides in length, preferably 2 nucleotides in length, wherein the overhanging sequence of the lower sequence is optionally complementary to a portion of the target sequence. The upper and lower sequences in the Table further can further comprise a chemical modification having Formulae I-VII, such as exemplary siNA constructs | | | | | |
| # shown in FIGS. 4 and 5, or having modifications described in Table IV or any combination thereof. | | | | | |

[0537] TABLE III
HCV Synthetic Modified siNA Constructs

| | | | | | | |
|---|---|---|---|---|---|---|
| Tar- | | | | | | |
| get | | Seq | | | | Seq |
| Pos | Target | ID | Cmpd# | Aliases | Sequence | ID |

| | | | | | | |
|---|---|---|---|---|---|---|
| 183 | GGUCCUUUCUUGGAUCAACCCGC | 1393 | 25237 | HCV IRES Loop IIIb | B GGUCCUUUCUUGGAUCAACCC B | 1467 |
| | | | | (Heptazyme site) as | | |
| | | | | siNA str1 (sense) | | |
| 183 | GGUCCUUUCUUGGAUCAACCCGC | 1393 | 25238 | HCV IRES Loop IIIb | B GGGUUGAUCCAAGAAAGGACC B | 1468 |
| | | | | (Heptazyme site) as | | |
| | | | | siNA str2 (antisense) | | |
| 183 | GGUCCUUUCUUGGAUCAACCCGC | 1393 | 25251 | HCV IRES Loop IIIb | B CCCAACUAGGUUCUUUCCUGG B | 1469 |
| | | | | (Heptazyme site) as | | |
| | | | | siNA str1 (sense) | | |
| | | | | Inverted Control | | |
| 183 | GGUCCUUUCUUGGAUCAACCCGC | 1393 | 25252 | HCV IRES Loop IIIb | B CCAGGAAAGAACCUAGUUGGG B | 1470 |
| | | | | (Heptazyme site) as | | |
| | | | | siNA str1 (sense) | | |
| | | | | Inverted Control | | |
| | | | | Compliment | | |
| 183 | GGUCCUUUCUUGGAUCAACCCGC | 1393 | 25814 | HCV IRES Loop IIIb | GGUCCUUUCUUGGAUCAACCCUU | 1471 |
| | | | | (Heptazyme site) as | | |
| | | | | siNA str1 (sense) + | | |
| | | | | 2U overhang | | |
| 183 | GGUCCUUUCUUGGAUCAACCCGC | 1393 | 25815 | HCV IRES Loop IIIb | GGGUUGAUCCAAGAAAGGACCUU | 1472 |
| | | | | (Heptazyme site) as | | |
| | | | | siNA str2 | | |
| | | | | (antisense) + 2U | | |
| | | | | overhang | | |
| 183 | GGUCCUUUCUUGGAUCAACCCGC | 1393 | 25834 | HCV IRES Loop IIIb | BGGUCCUUUCUUGGAUCAACCCUUB | 1473 |
| | | | | (Heptazyme site) as | | |
| | | | | siNA str1 (sense) + | | |
| | | | | 2U overhang | | |
| 183 | GGUCCUUUCUUGGAUCAACCCGC | 1393 | 25835 | HCV IRES Loop IIIb | BGGGUUGAUCCAAGAAAGGACCUUB | 1474 |
| | | | | (Heptazyme site) as | | |
| | | | | siNA str2 | | |
| | | | | (antisense) + 2U | | |
| | | | | overhang | | |
| 325 | UGCCCCGGGAGGUCUCGUAGACC | 1394 | 28415 | HCVa:325U21 sense TT | CCCCGGGAGGUCUCGUAGATT | 1475 |
| | | | | siNA | | |
| 162 | CGGAACCGGUGAGUACACC | 54 | 28416 | HCVa:162U21 sense TT | CGGAACCGGUGAGUACACCTT | 1476 |
| | | | | siNA | | |
| 324 | GCCCCGGGAGGUCUCGUAG | 1 | 28417 | HCVa:324U21 sense TT | GCCCCGGGAGGUCUCGUAGTT | 1477 |
| | | | | siNA | | |
| 163 | GGAACCGGUGAGUACACCG | 53 | 28418 | HCVa:163U21 sense TT | GGAACCGGUGAGUACACCGTT | 1478 |
| | | | | siNA | | |
| 294 | GUGGUACUGCCUGAUAGGG | 5 | 28419 | HCVa:294U21 sense TT | GUGGUACUGCCUGAUAGGGTT | 1479 |
| | | | | siNA | | |
| 293 | UGUGGUACUGCCUGAUAGG | 2 | 28420 | HCVa:293U21 sense TT | UGUGGUACUGCCUGAUAGGTT | 1480 |
| | | | | siNA | | |
| 292 | UUGUGGUACUGCCUGAUAG | 3 | 28421 | HCVa:292U21 sense TT | UUGUGGUACUGCCUGAUAGTT | 1481 |
| | | | | siNA | | |
| 325 | UGCCCCGGGAGGUCUCGUAGACC | 1394 | 28422 | HCVa:343L21 antisense | UCUACGAGACCUCCCGGGGTT | 1482 |
| | | | | TT siNA (325C) | | |
| 162 | CGGAACCGGUGAGUACACC | 54 | 28423 | HCVa:180L21 antisense | GGUGUACUCACCGGUUCCGTT | 1483 |
| | | | | TT siNA (162C) | | |
| 324 | GCCCCGGGAGGUCUCGUAG | 1 | 28424 | HCVa:342L21 antisense | CUACGAGACCUCCCGGGGCTT | 1484 |
| | | | | TT siNA (324C) | | |
| 163 | GGAACCGGUGAGUACACCG | 53 | 28425 | HCVa:181L21 antisense | CGGUGUACUCACCGGUUCCTT | 1485 |
| | | | | TT siNA (163C) | | |
| 294 | GUGGUACUGCCUGAUAGGG | 5 | 28426 | HCVa:312L21 antisense | CCCUAUCAGGCAGUACCACTT | 1486 |
| | | | | TT siNA (294C) | | |
| 293 | UGUGGUACUGCCUGAUAGG | 2 | 28427 | HCVa:311L21 antisense | CCUAUCAGGCAGUACCACATT | 1487 |
| | | | | TT siNA (293C) | | |
| 292 | UUGUGGUACUGCCUGAUAG | 3 | 28428 | HCVa:310L21 antisense | CUAUCAGGCAGUACCACAATT | 1488 |
| | | | | TT siNA (292C) | | |
| 325 | UGCCCCGGGAGGUCUCGUAGACC | 1394 | 28429 | HCVa:325U21 sense TT | TTAGAUGCUCUGGAGGGCCCC | 1489 |
| | | | | siNA inv | | |
| 162 | CGGAACCGGUGAGUACACC | 54 | 28430 | HCVa:162U21 sense TT | TTCCACAUGAGUGGCCAAGGC | 1490 |
| | | | | siNA inv | | |
| 324 | GCCCCGGGAGGUCUCGUAG | 1 | 28431 | HCVa:324U21 sense TT | TTGAUGCUCUGGAGGGCCCCG | 1491 |
| | | | | siNA inv | | |
| 163 | GGAACCGGUGAGUACACCG | 53 | 28432 | HCVa:163U21 sense TT | TTGCCACAUGAGUGGCCAAGG | 1492 |
| | | | | siNA inv | | |
| 294 | GUGGUACUGCCUGAUAGGG | 5 | 28433 | HCVa:294U21 sense TT | TTGGGAUAGUCCGUCAUGGUG | 1493 |
| | | | | siNA inv | | |
| 293 | UGUGGUACUGCCUGAUAGG | 2 | 28434 | HCVa:293U21 sense TT | TTGGAUAGUCCGUCAUGGUGU | 1494 |
| | | | | siNA inv | | |
| 292 | UUGUGGUACUGCCUGAUAG | 3 | 28435 | HCVa:292U21 sense TT | TTGAUAGUCCGUCAUGGUGUU | 1495 |
| | | | | siNA inv | | |
| 325 | UGCCCCGGGAGGUCUCGUAGACC | 1394 | 28436 | HCVa:343L21 antisense | TTGGGGCCCUCCAGAGCAUCU | 1496 |
| | | | | TT siNA (325C) inv | | |
| 162 | CGGAACCGGUGAGUACACC | 54 | 28437 | HCVa:180L21 antisense | TTGCCUUGGCCACUCAUGUGG | 1497 |
| | | | | TT siNA (162C) inv | | |
| 324 | GCCCCGGGAGGUCUCGUAG | 1 | 28438 | HCVa:342L21 antisense | TTCGGGGCCCUCCAGAGCAUC | 1498 |
| | | | | TT siNA (324C) inv | | |
| 163 | GGAACCGGUGAGUACACCG | 53 | 28439 | HCVa:181L21 antisense | TTCCUUGGCCACUCAUGUGGC | 1499 |
| | | | | TT siNA (163C) inv | | |
| 294 | GUGGUACUGCCUGAUAGGG | 5 | 28440 | HCVa:312L21 antisense | TTCACCAUGACGGACUAUCCC | 1500 |
| | | | | TT siNA (294C) inv | | |
| 293 | UGUGGUACUGCCUGAUAGG | 2 | 28441 | HCVa:311L21 antisense | TTACACCAUGACGGACUAUCC | 1501 |
| | | | | TT siNA (293C) inv | | |
| 292 | UUGUGGUACUGCCUGAUAG | 3 | 28442 | HCVa:310L21 antisense | TTAACACCAUGACGGACUAUC | 1502 |
| | | | | TT siNA (292C) inv | | |
| 162 | UGCGGAACCGGUGAGUACACCGG | 1395 | 29573 | HCVa:162U21 sense | CGGAACCGGUGAGUACACCGG | 1503 |
| | | | | siNA | | |
| 163 | GCGGAACCGGUGAGUACACCGGA | 1396 | 29574 | HCVa:163U21 sense | GGAACCGGUGAGUACACCGGA | 1504 |
| | | | | siNA | | |
| 292 | CCUUGUGGUACUGCCUGAUAGGG | 1397 | 29575 | HCVa:292U21 sense | UUGUGGUACUGCCUGAUAGGG | 1505 |
| | | | | siNA | | |
| 293 | CUUGUGGUACUGCCUGAUAGGGU | 1398 | 29576 | HCVa:293U21 sense | UGUGGUACUGCCUGAUAGGGU | 1508 |
| | | | | siNA | | |
| 294 | UUGUGGUACUGCCUGAUAGGGUG | 1399 | 29577 | HCVa:294U21 sense | GUGGUACUGCCUGAUAGGGUG | 1507 |
| | | | | siNA | | |
| 324 | GUGCCCCGGGAGGUCUCGUAGAC | 1400 | 29578 | HCVa:324U21 sense | GCCCCGGGAGGUCUCGUAGAC | 1508 |
| | | | | siNA | | |
| 325 | UGCCCCGGGAGGUCUCGUAGACC | 1394 | 29579 | HCVa:325U21 sense | CCCCGGGAGGUCUCGUAGACC | 1509 |
| | | | | siNA | | |
| 162 | UGCGGAACCGGUGAGUACACCGG | 1395 | 29580 | HCVa:180L21 antisense | GGUGUACUCACCGGUUCCGCA | 1510 |
| | | | | siNA (162C) | | |
| 163 | GCGGAACCGGUGAGUACACCGGA | 1396 | 29581 | HCVa:181L21 antisense | CGGUGUACUCACCGGUUCCGC | 1511 |
| | | | | siNA (163C) | | |
| 292 | CCUUGUGGUACUGCCUGAUAGGG | 1397 | 29582 | HCVa:310L21 antisense | CUAUCAGGCAGUACCACAAGG | 1512 |
| | | | | siNA (292C) | | |
| 293 | CUUGUGGUACUGCCUGAUAGGGU | 1398 | 29583 | HCVa:311L21 antisense | CCUAUCAGGCAGUACCACAAG | 1513 |
| | | | | siNA (293C) | | |
| 294 | UUGUGGUACUGCCUGAUAGGGUG | 1399 | 29584 | HCVa:312L21 antisense | CCCUAUCAGGCAGUACCACAA | 1514 |
| | | | | siNA (294C) | | |
| 324 | GUGCCCCGGGAGGUCUCGUAGAC | 1400 | 29585 | HCVa:342L21 antisense | CUACGAGACCUCCCGGGGCAC | 1515 |
| | | | | siNA (324C) | | |
| 325 | UGCCCCGGGAGGUCUCGUAGACC | 1394 | 29586 | HCVa:343L21 antisense | UCUACGAGACCUCCCGGGGCA | 1516 |
| | | | | siNA (325C) | | |
| 162 | UGCGGAACCGGUGAGUACACCGG | 1395 | 29587 | HCVa:162U21 sense | GGCCACAUGAGUGGCCAAGGC | 1517 |
| | | | | siNA inv | | |
| 163 | GCGGAACCGGUGAGUACACCGGA | 1396 | 29588 | HCVa:163U21 sense | AGGCCACAUGAGUGGCCAAGG | 1518 |
| | | | | siNA inv | | |
| 292 | CCUUGUGGUACUGCCUGAUAGGG | 1397 | 29589 | HCVa:292U21 sense | GGGAUAGUCCGUCAUGGUGUU | 1519 |
| | | | | siNA inv | | |
| 293 | CUUGUGGUACUGCCUGAUAGGGU | 1398 | 29590 | HCVa:293U21 sense | UGGGAUAGUCCGUCAUGGUGU | 1520 |
| | | | | siNA inv | | |
| 294 | UUGUGGUACUGCCUGAUAGGGUG | 1399 | 29591 | HCVa:294U21 sense | GUGGGAUAGUCCGUCAUGGUG | 1521 |
| | | | | siNA inv | | |
| 324 | GUGCCCCGGGAGGUCUCGUAGAC | 1400 | 29592 | HCVa:324U21 sense | CAGAUGCUCUGGAGGGCCCCG | 1522 |
| | | | | siNA inv | | |
| 325 | UGCCCCGGGAGGUCUCGUAGACC | 1394 | 29593 | HCVa:325U21 sense | CCAGAUGCUCUGGAGGGCCCC | 1523 |
| | | | | siNA inv | | |
| 162 | UGCGGAACCGGUGAGUACACCGG | 1395 | 29594 | HCVa:180L21 antisense | ACGCCUUGGCCACUCAUGUGG | 1524 |
| | | | | siNA (162C) inv | | |
| 163 | GCGGAACCGGUGAGUACACCGGA | 1396 | 29595 | HCVa:181L21 antisense | CGCCUUGGCCACUCAUGUGGC | 1525 |
| | | | | siNA (163C) inv | | |
| 292 | CCUUGUGGUACUGCCUGAUAGGG | 1397 | 29596 | HCVa:310L21 antisense | GGAACACCAUGACGGACUAUC | 1526 |
| | | | | siNA (292C) inv | | |
| 293 | CUUGUGGUACUGCCUGAUAGGGU | 1398 | 29597 | HCVa:311L21 antisense | GAACACCAUGACGGACUAUCC | 1527 |
| | | | | siNA (293C) inv | | |
| 294 | UUGUGGUACUGCCUGAUAGGGUG | 1399 | 29598 | HCVa:312L21 antisense | AACACCAUGACGGACUAUCCC | 1528 |
| | | | | siNA (294C) inv | | |
| 324 | GUGCCCCGGGAGGUCUCGUAGAC | 1400 | 29599 | HCVa:342L21 antisense | CACGGGGCCCUCCAGAGCAUC | 1529 |
| | | | | siNA (324C) inv | | |
| 325 | UGCCCCGGGAGGUCUCGUAGACC | 1394 | 29600 | HCVa:343L21 antisense | ACGGGGCCCUCCAGAGCAUCU | 1530 |
| | | | | siNA (325C) inv | | |
| 325 | UGCCCCGGGAGGUCUCGUAGACC | 1394 | 30051 | HCVa:325U21 sense | BCsCsCsCsGsGGAGGUCUCGUAGAXXB | 1531 |
| | | | | siNA 5 5′ P = S + 3′ | | |
| | | | | univ. base 2 + 5′/3′ | | |
| | | | | invAba | | |
| 325 | UGCCCCGGGAGGUCUCGUAGACC | 1394 | 30052 | HCVa:325U21 sense | BAsGsAsUsGsCUCUGGAGGGCCCCXXB | 1532 |
| | | | | siNA inv 5 5′ P = S + | | |
| | | | | 3′ univ. base 2 + | | |
| | | | | 5′/3′ invAba | | |
| 325 | UGCCCCGGGAGGUCUCGUAGACC | 1394 | 30053 | HCVa:343L21 antisense | UsCsUsAsCsGAGACCUCCCGGGGXXB | 1533 |
| | | | | siNA (325C) 5 5′ | | |
| | | | | P = S + 3′ univ. base | | |
| | | | | 2 + 3′ invAba | | |
| 325 | UGCCCCGGGAGGUCUCGUAGACC | 1394 | 30054 | HCVa:343L21 antisense | GsGsGsGsCsCCUCCAGAGCAUCUXXB | 1534 |
| | | | | siNA (325C) inv 5 5′ | | |
| | | | | P = S + 3′ univ. base | | |
| | | | | 2 + 3′ invAba | | |
| 325 | UGCCCCGGGAGGUCUCGUAGACC | 1394 | 30055 | HCVa:325U21 sense | BCsCsCsCsGGGAGGUsCsUsCsGUsAGAXXB | 1535 |
| | | | | siNA all Y P = S + 3′ | | |
| | | | | univ. base 2 + 5′/3′ | | |
| | | | | invAba | | |
| 325 | UGCCCCGGGAGGUCUCGUAGACC | 1394 | 30056 | HCVa:325U21 sense | BAGAUsGCsUsCsUsGGAGGGCsCsCsCsXXB | 1536 |
| | | | | siNA inv all Y | | |
| | | | | P = S + 3′ univ. base | | |
| | | | | 2 + 5′/3′ invAba | | |
| 325 | UGCCCCGGGAGGUCUCGUAGACC | 1394 | 30057 | HCVa:343L21 antisense | UsCsUsACsGAGACsCsUsCsCsCsGGGGXXB | 1537 |
| | | | | siNA (325C) all Y | | |
| | | | | P = S + 3′ univ. base | | |
| | | | | 2 + 3′ invAba | | |
| 325 | UGCCCCGGGAGGUCUCGUAGACC | 1394 | 30058 | HCVa:343L21 antisense | GGGGCsCsCsUsCsCsAGAGCsAUsCsUsXXB | 1538 |
| | | | | siNA (325C) inv all Y | | |
| | | | | P = S + 3′ univ. base | | |
| | | | | 2 + 3′ invAba | | |
| 325 | UGCCCCGGGAGGUCUCGUAGACC | 1394 | 30059 | HCVa:325U21 sense | BcscscscsGGGAGGucucGuAsGsAsXXB | 1539 |
| | | | | siNA 4/3 P = S ends + | | |
| | | | | all Y − 2′F + 3′ | | |
| | | | | univ. base 2 + 5′/3′ | | |
| | | | | invAba | | |
| 325 | UGCCCCGGGAGGUCUCGUAGACC | 1394 | 30060 | HCVa:325U21 sense | BAsGsAsusGcucuGGAGGGccscscsXXB | 1540 |
| | | | | siNA inv 4/3 P = S | | |
| | | | | ends + all Y − 2′F + | | |
| | | | | 3′ univ. base 2 + | | |
| | | | | 5′/3′ invAba | | |
| 325 | UGCCCCGGGAGGUCUCGUAGACC | 1394 | 30170 | HCVa:325U21 sense | B ccccGGGAGGucucGuAGAXX B | 1541 |
| | | | | siNA all Y − 2′F + | | |
| | | | | 3′ univ. base 2 + | | |
| | | | | 5′/3′ invAba | | |
| 325 | UGCCCCGGGAGGUCUCGUAGACC | 1394 | 30171 | HCVa:325U21 sense | B AGAuGcucuGGAGGGccccXX B 1542 | |
| | | | | siNA inv all Y − | | |
| | | | | 2′F + 3′ univ. base | | |
| | | | | 2 + 5′/3′ invAba | | |
| 325 | UGCCCCGGGAGGUCUCGUAGACC | 1394 | 30172 | HCVa:343L21 antisense | B UsCsUsACsGAGACsCsUsCsCsCsGGGGXX B | 1543 |
| | | | | siNA (325C) all Y | | |
| | | | | P = S + 3′ univ. base | | |
| | | | | 2 + 5′/3′ invAba | | |
| 325 | UGCCCCGGGAGGUCUCGUAGACC | 1394 | 30173 | HCVa:343L19 antisense | ucuAcGAGAccucccGGGG | 1544 |
| | | | | siNA (325C) all Y − | | |
| | | | | 2′F | | |
| 325 | UGCCCCGGGAGGUCUCGUAGACC | 1394 | 30175 | HCVa:343L21 antisense | ucuAcGAGAccucccGGGGXX | 1545 |
| | | | | siNA (325C) all | | |
| | | | | Y − 2′F + 3′ univ. | | |
| | | | | Base 2 | | |
| 325 | UGCCCCGGGAGGUCUCGUAGACC | 1394 | 30176 | HCVa:343L21 antisense | GGGGcccuccAGAGcAucuXX | 1546 |
| | | | | siNA (325C) inv all | | |
| | | | | Y − 2′F + 3′ univ. | | |
| | | | | Base 2 | | |
| 325 | UGCCCCGGGAGGUCUCGUAGACC | 1394 | 30177 | HCVa:343L21 antisense | B ucuAcGAGAccucccGGGGXX B | 1547 |
| | | | | siNA (325C) all | | |
| | | | | Y − 2′F + 3′ univ. | | |
| | | | | Base 2 + 5′/3′ iB | | |
| 325 | UGCCCCGGGAGGUCUCGUAGACC | 1394 | 30178 | HCVa:325U21 sense | CsCsCsCsGGGAGGUsCsUsCsGUsAGAXX B | 1548 |
| | | | | siNA all Y P = S + 3′ | | |
| | | | | univ. base 2 + 3′ | | |
| | | | | invAba | | |
| 325 | UGCCCCGGGAGGUCUCGUAGACC | 1394 | 30417 | HCVa:325U21 sense | CCCCGGGAGGUCUCGUAGACC B | 1549 |
| | | | | siNA w/iB | | |
| 325 | UGCCCCGGGAGGUCUCGUAGACC | 1394 | 30418 | HCVa:325U21 sense | B CCCCGGGAGGUCUCGUAGACC B | 1550 |
| | | | | siNA w/iB | | |
| 325 | UGCCCCGGGAGGUCUCGUAGACC | 1394 | 30419 | HCVa:343L21 antisense | UCUACGAGACCUCCCGGGGCA B | 1551 |
| | | | | siNA (325C) w/iB | | |
| 325 | UGCCCCGGGAGGUCUCGUAGACC | 1394 | 30420 | HCVa:343L21 antisense | B UCUACGAGACCUCCCGGGGCA B | 1552 |
| | | | | siNA (325C) w/iB | | |
| 325 | UGCCCCGGGAGGUCUCGUAGACC | 1394 | 30561 | HCVa:325U21 sense | B ccccGGGAGGucucGuAGATT B | 1553 |
| | | | | siNA Y − 2′Ome | | |
| | | | | (stab06) + 5′/3′ | | |
| | | | | invAba | | |
| 325 | UGCCCCGGGAGGUCUCGUAGACC | 1394 | 30562 | HCVa:343L21 antisense | ucuAcGAGAccucccGGGGTsT | 1554 |
| | | | | siNA (325C) Y − 2′F, | | |
| | | | | R − 2′Ome + TsT | | |
| 153 | AUAGUGGUCUGCGGAACCGGUGA | 1401 | 30649 | HCVa:153U21 sense | B AGuGGucuGcGGAAccGGuTT B | 1555 |
| | | | | siNA stab07 | | |
| 159 | GUCUGCGGAACCGGUGAGUACAC | 1402 | 30650 | HCVa:159U21 sense | B cuGcGGAAccGGuGAGuAcTT B | 1556 |
| | | | | siNA stab07 | | |
| 291 | GCCUUGUGGUACUGCCUGAUAGG | 1403 | 30651 | HCVa:291U21 sense | B cuuGuGGuAcuGccuGAuATT B | 1557 |
| | | | | siNA stab07 | | |
| 295 | UGUGGUACUGCCUGAUAGGGUGC | 1404 | 30652 | HCVa:295U21 sense | B uGGuAcuGccuGAuAGGGuTT B | 1558 |
| | | | | siNA stab07 | | |
| 296 | GUGGUACUGCCUGAUAGGGUGCU | 1405 | 30653 | HCVa:296U21 sense | B GGuAcuGccuGAuAGGGuGTT B | 1559 |
| | | | | siNA stab07 | | |
| 297 | UGGUACUGCCUGAUAGGGUGCUU | 1406 | 30654 | HCVa:297U21 sense | B GuAcuGccuGAuAGGGuGcTT B | 1560 |
| | | | | siNA stab07 | | |
| 298 | GGUACUGCCUGAUAGGGUGCUUG | 1407 | 30655 | HCVa:298U21 sense | B uAcuGccuGAuAGGGuGcuTT B | 1561 |
| | | | | siNA stab07 | | |
| 300 | UACUGCCUGAUAGGGUGCUUGCG | 1408 | 30656 | HCVa:300U21 sense | B cuGccuGAuAGGGuGcuuGTT B | 1562 |
| | | | | siNA stab07 | | |
| 301 | ACUGCCUGAUAGGGUGCUUGCGA | 1409 | 30657 | HCVa:301U21 sense | B uGccuGAuAGGGuGcuuGcTT B | 1563 |
| | | | | siNA stab07 | | |
| 303 | UGCCUGAUAGGGUGCUUGCGAGU | 1410 | 30658 | HCVa:303U21 sense | B ccuGAuAGGGuGcuuGcGATT B | 1564 |
| | | | | siNA stab07 | | |
| 306 | CUGAUAGGGUGCUUGCGAGUGCC | 1411 | 30659 | HCVa:306U21 sense | B GAuAGGGuGcuuGcGAGuGTT B | 1565 |
| | | | | siNA stab07 | | |
| 324 | GUGCCCCGGGAGGUCUCGUAGAC | 1400 | 30660 | HCVa:324U21 sense | B GccccGGGAGGucucGuAGTT B | 1566 |
| | | | | siNA stab07 | | |
| 153 | AUAGUGGUCUGCGGAACCGGUGA | 1401 | 30661 | HCVa:171L21 antisense | AccGGuuccGcAGAccAcuTsT | 1567 |
| | | | | siNA (153C) stab08 | | |
| 159 | GUCUGCGGAACCGGUGAGUACAC | 1402 | 30662 | HCVa:177L21 antisense | GuAcucAccGGuuccGcAGTsT | 1568 |
| | | | | siNA (159C) stab08 | | |
| 291 | GCCUUGUGGUACUGCCUGAUAGG | 1403 | 30663 | HCVa:309L21 antisense | uAucAGGcAGuAccAcAAGTsT | 1569 |
| | | | | siNA (291C) stab08 | | |
| 295 | UGUGGUACUGCCUGAUAGGGUGC | 1404 | 30664 | HCVa:313L21 antisense | AcccuAucAGGcAGuAccATsT | 1570 |
| | | | | siNA (295C) stab08 | | |
| 296 | GUGGUACUGCCUGAUAGGGUGCU | 1405 | 30665 | HCVa:314L21 antisense | cAcccuAucAGGcAGuAccTsT | 1571 |
| | | | | siNA (296C) stab08 | | |
| 297 | UGGUACUGCCUGAUAGGGUGCUU | 1406 | 30666 | HCVa:315L21 antisense | GcAcccuAucAGGcAGuAcTsT | 1572 |
| | | | | siNA (297C) stab08 | | |
| 298 | GGUACUGCCUGAUAGGGUGCUUG | 1407 | 30667 | HCVa:316L21 antisense | AGcAcccuAucAGGcAGuATsT | 1573 |
| | | | | siNA (298C) stab08 | | |
| 300 | UACUGCCUGAUAGGGUGCUUGCG | 1408 | 30668 | HCVa:318L21 antisense | cAAGcAcccuAucAGGcAGTsT | 1574 |
| | | | | siNA (300C) stab08 | | |
| 301 | ACUGCCUGAUAGGGUGCUUGCGA | 1409 | 30669 | HCVa:319L21 antisense | GcAAGcAcccuAucAGGcATsT | 1575 |
| | | | | siNA (301C) stab08 | | |
| 303 | UGCCUGAUAGGGUGCUUGCGAGU | 1410 | 30670 | HCVa:321L21 antisense | ucGcAAGcAcccuAucAGGTsT | 1576 |
| | | | | siNA (303C) stab08 | | |
| 306 | CUGAUAGGGUGCUUGCGAGUGCC | 1411 | 30671 | HCVa:324L21 antisense | cAcucGcAAGcAcccuAucTsT | 1577 |
| | | | | siNA (306C) stab08 | | |
| 324 | GUGCCCCGGGAGGUCUCGUAGAC | 1400 | 30672 | HCVa:342L21 antisense | cuAcGAGAccucccGGGGcTsT | 1578 |
| | | | | siNA (324C) stab08 | | |
| 153 | AUAGUGGUCUGCGGAACCGGUGA | 1401 | 30673 | HCVa:153U21 sense | B uGGccAAGGcGucuGGuGATT B | 1579 |
| | | | | siNA stab07 inv | | |
| 159 | GUCUGCGGAACCGGUGAGUACAC | 1402 | 30674 | HCVa:159U21 sense | B cAuGAGuGGccAAGGcGucTT B | 1580 |
| | | | | siNA stab07 inv | | |
| 291 | GCCUUGUGGUACUGCCUGAUAGG | 1403 | 30675 | HCVa:291U21 sense | B AuAGuccGucAuGGuGuucTT B | 1581 |
| | | | | siNA stab07 inv | | |
| 295 | UGUGGUACUGCCUGAUAGGGUGC | 1404 | 30676 | HCVa:295U21 sense | B uGGGAuAGuccGucAuGGuTT B | 1582 |
| | | | | siNA stab07 inv | | |
| 296 | GUGGUACUGCCUGAUAGGGUGCU | 1405 | 30677 | HCVa:296U21 sense | B GuGGGAuAGuccGucAuGGTT B | 1583 |
| | | | | siNA stab07 inv | | |
| 297 | UGGUACUGCCUGAUAGGGUGCUU | 1406 | 30678 | HCVa:297U21 sense | B cGuGGGAuAGuccGucAuGTT B | 1584 |
| | | | | siNA stab07 inv | | |
| 298 | GGUACUGCCUGAUAGGGUGCUUG | 1407 | 30679 | HCVa:298U21 sense | B ucGuGGGAuAGuccGucAuTT B | 1585 |
| | | | | siNA stab07 inv | | |
| 300 | UACUGCCUGAUAGGGUGCUUGCG | 1408 | 30680 | HCVa:300U21 sense | B GuucGuGGGAuAGuccGucTT B | 1586 |
| | | | | siNA stab07 inv | | |
| 301 | ACUGCCUGAUAGGGUGCUUGCGA | 1409 | 30681 | HCVa:301U21 sense | B cGuucGuGGGAuAGuccGuTT B | 1587 |
| | | | | siNA stab07 inv | | |
| 303 | UGCCUGAUAGGGUGCUUGCGAGU | 1410 | 30682 | HCVa:303U21 sense | B AGcGuucGuGGGAuAGuccTT B | 1588 |
| | | | | siNA stab07 inv | | |
| 306 | CUGAUAGGGUGCUUGCGAGUGCC | 1411 | 30683 | HCVa:306U21 sense | B GuGAGcGuucGuGGGAuAGTT B | 1589 |
| | | | | siNA stab07 inv | | |
| 324 | GUGCCCCGGGAGGUCUCGUAGAC | 1400 | 30684 | HCVa:324U21 sense | B GAuGcucuGGAGGGccccGTT B | 1590 |
| | | | | siNA stab07 inv | | |
| 153 | AUAGUGGUCUGCGGAACCGGUGA | 1401 | 30685 | HCVa:171L21 antisense | ucAccAGAcGccuuGGccATsT | 1591 |
| | | | | siNA (153C) stab08 | | |
| | | | | inv | | |
| 159 | GUCUGCGGAACCGGUGAGUACAC | 1402 | 30686 | HCVa:177L21 antisense | GacGccuuGGccAcucAuGTsT | 1592 |
| | | | | siNA (159C) stab08 | | |
| | | | | inv | | |
| 291 | GCCUUGUGGUACUGCCUGAUAGG | 1403 | 30687 | HCVa:309L21 antisense | GAAcAccAuGAcGGAcuAuTsT | 1593 |
| | | | | siNA (291C) stab08 | | |
| | | | | inv | | |
| 295 | UGUGGUACUGCCUGAUAGGGUGC | 1404 | 30688 | HCVa:313L21 antisense | AccAuGAcGGAcuAucccATsT | 1594 |
| | | | | siNA (295C) stab08 | | |
| | | | | inv | | |
| 296 | GUGGUACUGCCUGAUAGGGUGCU | 1405 | 30689 | HCVa:314L21 antisense | ccAuGAcGGAcuAucccAcTsT | 1595 |
| | | | | siNA (296C) stab08 | | |
| | | | | inv | | |
| 297 | UGGUACUGCCUGAUAGGGUGCUU | 1406 | 30690 | HCVa:315L21 antisense | cAuGAcGGAcuAucccAcGTsT | 1596 |
| | | | | siNA (297C) stab08 | | |
| | | | | inv | | |
| 298 | GGUACUGCCUGAUAGGGUGCUUG | 1407 | 30691 | HCVa:316L21 antisense | AuGAcGGAcuAucccAcGATsT | 1597 |
| | | | | siNA (298C) stab08 | | |
| | | | | inv | | |
| 300 | UACUGCCUGAUAGGGUGCUUGCG | 1408 | 30692 | HCVa:318L21 antisense | GAcGGAcuAucccAcGAAcTsT | 1598 |
| | | | | siNA (300C) stab08 | | |
| | | | | inv | | |
| 301 | ACUGCCUGAUAGGGUGCUUGCGA | 1409 | 30693 | HCVa:319L21 antisense | AcGGAcuAucccAcGAAcGTsT | 1599 |
| | | | | siNA (301C) stab08 | | |
| | | | | inv | | |
| 303 | UGCCUGAUAGGGUGCUUGCGAGU | 1410 | 30694 | HCVa:321L21 antisense | GGAcuAucccAcGAAcGcuTsT | 1600 |
| | | | | siNA (303C) stab08 | | |
| | | | | inv | | |
| 306 | CUGAUAGGGUGCUUGCGAGUGCC | 1411 | 30695 | HCVa:324L21 antisense | cuAucccAcGAAcGcucAcTsT | 1601 |
| | | | | siNA (306C) stab08 | | |
| | | | | inv | | |
| 324 | GUGCCCCGGGAGGUCUCGUAGAC | 1400 | 30696 | HCVa:342L21 antisense | cGGGGcccuccAGAGcAucTsT | 1602 |
| | | | | siNA (324C) stab08 | | |
| | | | | inv | | |
| 325 | UGCCCCGGGAGGUCUCGUAGACC | 1394 | 31340 | HCVa:325U21 sense | B ccccGGGAGGucucGuAGATT B | 1603 |
| | | | | siNA stab04 | | |
| 325 | UGCCCCGGGAGGUCUCGUAGACC | 1394 | 31341 | HCVa:325U21 sense | B AGAuGcucuGGAGGGccccTT B | 1604 |
| | | | | siNA inv stab04 | | |
| 325 | UGCCCCGGGAGGUCUCGUAGACC | 1394 | 31342 | HCVa:343L21 antisense | ucuAcGAGAccucccGGGGTsT | 1605 |
| | | | | siNA (325C) stab05 | | |
| 325 | UGCCCCGGGAGGUCUCGUAGACC | 1394 | 31343 | HCVa:343L21 antisense | GGGGcccuccAGAGcAucuTsT | 1606 |
| | | | | siNA (325C) inv | | |
| | | | | stab05 | | |
| 325 | UGCCCCGGGAGGUCUCGUAGACC | 1394 | 31344 | HCVa:325U21 sense | B ccccGGGAGGucucGuAGATT B | 1607 |
| | | | | siNA stab07 | | |
| 325 | UGCCCCGGGAGGUCUCGUAGACC | 1394 | 31345 | HCVa:325U21 sense | B AGAuGcucuGGAGGGccccTT B | 1608 |
| | | | | siNA inv stab07 | | |
| 325 | UGCCCCGGGAGGUCUCGUAGACC | 1394 | 31346 | HCVa:343L21 antisense | GGGGcccuccAGAGcAucuTsT | 1609 |
| | | | | siNA (325C) inv | | |
| | | | | stab08 | | |
| 325 | UGCCCCGGGAGGUCUCGUAGACC | 1394 | 31347 | HCVa:343L21 antisense | ucuAcGAGAccucccGGGGTsT | 1610 |
| | | | | siNA (325C) stab11 | | |
| 325 | UGCCCCGGGAGGUCUCGUAGACC | 1394 | 31348 | HCVa:343L21 antisense | GGGGcccuccAGAGcAucuTsT | 1611 |
| | | | | siNA (325C) inv | | |
| | | | | stab11 | | |
| 153 | AUAGUGGUCUGCGGAACCGGUGA | 1401 | 31453 | HCVa:153U21 sense | B AGuGGucuGcGGAAccGGuTT B | 1612 |
| | | | | siNA stab04 | | |
| 159 | GUCUGCGGAACCGGUGAGUACAC | 1402 | 31454 | HCVa:159U21 sense | B cuGcGGAAccGGuGAGuAcTT B | 1613 |
| | | | | siNA stab04 | | |
| 287 | AAAGGCCUUGUGGUACUGCCUGA | 1412 | 31455 | HCVa:287U21 sense | B AGGccuuGuGGuAcuGccuTT B | 1614 |
| | | | | siNA stab04 | | |
| 291 | GCCUUGUGGUACUGCCUGAUAGG | 1403 | 31456 | HCVa:291U21 sense | B cuuGuGGuAcuGccuGAuATT B | 1615 |
| | | | | siNA stab04 | | |
| 295 | UGUGGUACUGCCUGAUAGGGUGC | 1404 | 31457 | HCVa:295U21 sense | B uGGuAcuGccuGAuAGGGuTT B | 1616 |
| | | | | siNA stab04 | | |
| 296 | GUGGUACUGCCUGAUAGGGUGCU | 1405 | 31458 | HCVa:296U21 sense | B GGuAcuGccuGAuAGGGuGTT B | 1617 |
| | | | | siNA stab04 | | |
| 297 | UGGUACUGCCUGAUAGGGUGCUU | 1406 | 31459 | HCVa:297U21 sense | B GuAcuGccuGAuAGGGuGcTT B | 1618 |
| | | | | siNA stab04 | | |
| 298 | GGUACUGCCUGAUAGGGUGCUUG | 1407 | 31460 | HCVa:298U21 sense | B uAcuGccuGAuAGGGuGcuTT B | 1619 |
| | | | | siNA stab04 | | |
| 300 | UACUGCCUGAUAGGGUGCUUGCG | 1408 | 31461 | HCVa:300U21 sense | B cuGccuGAuAGGGuGcuuGTT B | 1620 |
| | | | | siNA stab04 | | |
| 301 | ACUGCCUGAUAGGGUGCUUGCGA | 1409 | 31462 | HCVa:301U21 sense | B uGccuGAuAGGGuGcuuGcTT B | 1621 |
| | | | | siNA stab04 | | |
| 303 | UGCCUGAUAGGGUGCUUGCGAGU | 1410 | 31463 | HCVa:303U21 sense | B ccuGAuAGGGuGcuuGcGATT B | 1622 |
| | | | | siNA stab04 | | |
| 306 | CUGAUAGGGUGCUUGCGAGUGCC | 1411 | 31464 | HCVa:306U21 sense | B GAuAGGGuGcuuGcGAGuGTT B | 1623 |
| | | | | siNA stab04 | | |
| 153 | AUAGUGGUCUGCGGAACCGGUGA | 1401 | 31465 | HCVa:171L21 antisense | AccGGuuccGcAGAccAcuTsT | 1624 |
| | | | | siNA (153C) stab05 | | |
| 159 | GUCUGCGGAACCGGUGAGUACAC | 1402 | 31466 | HCVa:177L21 antisense | GuAcucAccGGuuccGcAGTsT | 1625 |
| | | | | siNA (159C) stab05 | | |
| 287 | AAAGGCCUUGUGGUACUGCCUGA | 1412 | 31467 | HCVa:305L21 antisense | AGGcAGuAccAcAAGGccuTsT | 1626 |
| | | | | siNA (287C) stab05 | | |
| 291 | GCCUUGUGGUACUGCCUGAUAGG | 1403 | 31468 | HCVa:309L21 antisense | uAucAGGcAGuAccAcAAGTsT | 1627 |
| | | | | siNA (291C) stab05 | | |
| 295 | UGUGGUACUGCCUGAUAGGGUGC | 1404 | 31469 | HCVa:313L21 antisense | AcccuAucAGGcAGuAccATsT | 1628 |
| | | | | siNA (295C) stab05 | | |
| 296 | GUGGUACUGCCUGAUAGGGUGCU | 1405 | 31470 | HCVa:314L21 antisense | cAcccuAucAGGcAGuAccTsT | 1629 |
| | | | | siNA (296C) stab05 | | |
| 297 | UGGUACUGCCUGAUAGGGUGCUU | 1406 | 31471 | HCVa:315L21 antisense | GcAcccuAucAGGcAGuAcTsT | 1630 |
| | | | | siNA (297C) stab05 | | |
| 298 | GGUACUGCCUGAUAGGGUGCUUG | 1407 | 31472 | HCVa:316L21 antisense | AGcACccuAucAGGcAGuATsT | 1631 |
| | | | | siNA (298C) stab05 | | |
| 300 | UACUGCCUGAUAGGGUGCUUGCG | 1408 | 31473 | HCVa:318L21 antisense | cAAGcAcccuAucAGGcAGTsT | 1632 |
| | | | | siNA (300C) stab05 | | |
| 301 | ACUGCCUGAUAGGGUGCUUGCGA | 1409 | 31474 | HCVa:319L21 antisense | GcAAGcAcccuAucAGGcATsT | 1633 |
| | | | | siNA (301C) stab05 | | |
| 303 | UGCCUGAUAGGGUGCUUGCGAGU | 1410 | 31475 | HCVa:321L21 antisense | ucGcAAGcAcccuAucAGGTsT | 1634 |
| | | | | siNA (303C) stab05 | | |
| 306 | CUGAUAGGGUGCUUGCGAGUGCC | 1411 | 31476 | HCVa:324L21 antisense | cAcucGcAAGcAcccuAucTsT | 1635 |
| | | | | siNA (306C) stab05 | | |
| 153 | AUAGUGGUCUGCGGAACCGGUGA | 1401 | 31477 | HCVa:153U21 sense | B uGGccAAGGcGucuGGuGATT B | 1636 |
| | | | | siNA inv stab04 | | |
| 159 | GUCUGCGGAACCGGUGAGUACAC | 1402 | 31478 | HCVa:159U21 sense | B cAuGAGuGGccAAGGcGucTT B | 1637 |
| | | | | siNA inv stab04 | | |
| 287 | AAAGGCCUUGUGGUACUGCCUGA | 1412 | 31479 | HCVa:287U21 sense | B uccGucAuGGuGuuccGGATT B | 1638 |
| | | | | siNA inv stab04 | | |
| 291 | GCCUUGUGGUACUGCCUGAUAGG | 1403 | 31480 | HCVa:291U21 sense | B AuAGuccGucAuGGuGuucTT B | 1639 |
| | | | | siNA inv stab04 | | |
| 295 | UGUGGUACUGCCUGAUAGGGUGC | 1404 | 31481 | HCVa:295U21 sense | B uGGGAuAGuccGucAuGGuTT B | 1640 |
| | | | | siNA inv stab04 | | |
| 296 | GUGGUACUGCCUGAUAGGGUGCU | 1405 | 31482 | HCVa:296U21 sense | B GuGGGAuAGuccGucAuGGTT B | 1641 |
| | | | | siNA inv stab04 | | |
| 297 | UGGUACUGCCUGAUAGGGUGCUU | 1406 | 31483 | HCVa:297U21 sense | B cGuGGGAuAGuccGucAuGTT B | 1642 |
| | | | | siNA inv stab04 | | |
| 298 | GGUACUGCCUGAUAGGGUGCUUG | 1407 | 31484 | HCVa:298U21 sense | B ucGuGGGAuAGuccGucAuTT B | 1643 |
| | | | | siNA inv stab04 | | |
| 300 | UACUGCCUGAUAGGGUGCUUGCG | 1408 | 31485 | HCVa:300U21 sense | B GuucGuGGGAuAGuCcGucTT B | 1644 |
| | | | | siNA inv stab04 | | |
| 301 | ACUGCCUGAUAGGGUGCUUGCGA | 1409 | 31486 | HCVa:301U21 sense | B cGuucGuGGGAuAGuccGuTT B | 1645 |
| | | | | siNA inv stab04 | | |
| 303 | UGCCUGAUAGGGUGCUUGCGAGU | 1410 | 31487 | HCVa:303U21 sense | B AGcGuucGuGGGAuAGuccTT B | 1646 |
| | | | | siNA inv stab04 | | |
| 306 | CUGAUAGGGUGCUUGCGAGUGCC | 1411 | 31488 | HCVa:306U21 sense | B GuGAGcGuucGuGGGAuAGTT B | 1647 |
| | | | | siNA inv stab04 | | |
| 153 | AUAGUGGUCUGCGGAACCGGUGA | 1401 | 31489 | HCVa:171L21 antisense | ucAccAGAcGccuuGGccATsT | 1648 |
| | | | | siNA (153C) inv | | |
| | | | | stab05 | | |
| 159 | GUCUGCGGAACCGGUGAGUACAC | 1402 | 31490 | HCVa:177L21 antisense | GacGccuuGGccAcucAuGTsT | 1649 |
| | | | | siNA (159C) inv | | |
| | | | | stab05 | | |
| 287 | AAAGGCCUUGUGGUACUGCCUGA | 1412 | 31491 | HCVa:305L21 antisense | uccGGAAcAccAuGAcGGATsT | 1650 |
| | | | | siNA (287C) inv | | |
| | | | | stab05 | | |
| 291 | GCCUUGUGGUACUGCCUGAUAGG | 1403 | 31492 | HCVa:309L21 antisense | GAAcAccAuGAcGGAcuAuTsT | 1651 |
| | | | | siNA (291C) inv | | |
| | | | | stab05 | | |
| 295 | UGUGGUACUGCCUGAUAGGGUGC | 1404 | 31493 | HCVa:313L21 antisense | AccAuGAcGGAcuAucccATsT | 1652 |
| | | | | siNA (295C) inv | | |
| | | | | stab05 | | |
| 296 | GUGGUACUGCCUGAUAGGGUGCU | 1405 | 31494 | HCVa:314L21 antisense | ccAuGAcGGAcuAucccAcTsT | 1653 |
| | | | | siNA (296C) inv | | |
| | | | | stab05 | | |
| 297 | UGGUACUGCCUGAUAGGGUGCUU | 1406 | 31495 | HCVa:315L21 antisense | cAuGAcGGAcuAucccAcGTsT | 1654 |
| | | | | siNA (297C) inv | | |
| | | | | stab05 | | |
| 298 | GGUACUGCCUGAUAGGGUGCUUG | 1407 | 31496 | HCVa:316L21 antisense | AuGAcGGAcuAucccAcGATsT | 1655 |
| | | | | siNA (298C) inv | | |
| | | | | stab05 | | |
| 300 | UACUGCCUGAUAGGGUGCUUGCG | 1408 | 31497 | HCVa:318L21 antisense | GAcGGAcuAucccAcGAAcTsT | 1656 |
| | | | | siNA (300C) inv | | |
| | | | | stab05 | | |
| 301 | ACUGCCUGAUAGGGUGCUUGCGA | 1409 | 31498 | HCVa:319L21 antisense | AcGGAcuAucccAcGAAcGTsT | 1657 |
| | | | | siNA (301C) inv | | |
| | | | | stab05 | | |
| 303 | UGCCUGAUAGGGUGCUUGCGAGU | 1410 | 31499 | HCVa:321L21 antisense | GGAcuAucccAcGAAcGcuTsT | 1658 |
| | | | | siNA (303C) inv | | |
| | | | | stab05 | | |
| 306 | CUGAUAGGGUGCUUGCGAGUGCC | 1411 | 31500 | HCVa:324L21 antisense | cuAucccAcGAAcGcucAcTsT | 1659 |
| | | | | siNA (306C) inv | | |
| | | | | stab05 | | |
| 190 | GGGUCCUUUCUUGGAUCAACCCG | 1413 | 31659 | HCVb:190U21 sense | B GuccuuucuuGGAucAAccTT B | 1660 |
| | | | | siNA stab04 | | |
| 191 | GGUCCUUUCUUGGAUCAACCCGC | 1393 | 31660 | HCVb:191U21 sense | B uccuuucuuGGAucAAcccTT B | 1661 |
| | | | | siNA stab04 | | |
| 189 | CGGGUCCUUUCUUGGAUCAACCC | 1414 | 31661 | HCVb:189U21 sense | B GGuccuuucuuGGAucAAcTT B | 1662 |
| | | | | siNA stab04 | | |
| 186 | GACCGGGUCCUUUCUUGGAUCAA | 1415 | 31662 | HCVb:186U21 sense | B ccGGGuccuuucuuGGAucTT B | 1663 |
| | | | | siNA stab04 | | |
| 190 | GGGUCCUUUCUUGGAUCAACCCG | 1413 | 31663 | HCVb:208L21 antisense | GGuuGAuccAAGAAAGGAcTsT | 1664 |
| | | | | siNA (190C) stab05 | | |
| 191 | GGUCCUUUCUUGGAUCAACCCGC | 1393 | 31664 | HCVb:209L21 antisense | GGGuuGAuccAAGAAAGGATsT | 1665 |
| | | | | siNA (191C) stab05 | | |
| 189 | CGGGUCCUUUCUUGGAUCAACCC | 1414 | 31665 | HCVb:207L21 antisense | GuuGAuccAAGAAAGGAccTsT | 1666 |
| | | | | siNA (189C) stab05 | | |
| 186 | GACCGGGUCCUUUCUUGGAUCAA | 1415 | 31666 | HCVb:204L21 antisense | GAuccAAGAAAGGAcccGGTsT | 1667 |
| | | | | siNA (186C) stab05 | | |
| 190 | GGGUCCUUUCUUGGAUCAACCCG | 1413 | 31667 | HCVb:190U21 sense | B ccAAcuAGGuucuuuccuGTT B | 1668 |
| | | | | siNA inv stab04 | | |
| 191 | GGUCCUUUCUUGGAUCAACCCGC | 1393 | 31668 | HCVb:191U21 sense | B cccAAcuAGGuucuuuccuTT B | 1669 |
| | | | | siNA inv stab04 | | |
| 189 | CGGGUCCUUUCUUGGAUCAACCC | 1414 | 31669 | HCVb:189U21 sense | B cAAcuAGGuucuuuccuGGTT B | 1670 |
| | | | | siNA inv stab04 | | |
| 186 | GACCGGGUCCUUUCUUGGAUCAA | 1415 | 31670 | HCVb:186U21 sense | B cuAGGuucuuuccuGGGccTT B | 1671 |
| | | | | siNA inv stab04 | | |
| 190 | GGGUCCUUUCUUGGAUCAACCCG | 1413 | 31671 | HCVb:208L21 antisense | cAGGAAAGAAccuAGuuGGTsT | 1672 |
| | | | | siNA (190C) inv stab05 | | |
| 191 | GGUCCUUUCUUGGAUCAACCCGC | 1393 | 31672 | HCVb:209L21 antisense | AGGAAAGAAccuAGuuGGGTsT | 1673 |
| | | | | siNA (191C) inv stab05 | | |
| 189 | CGGGUCCUUUCUUGGAUCAACCC | 1414 | 31673 | HCVb:207L21 antisense | ccAGGAAAGAAccuAGuuGTsT | 1674 |
| | | | | siNA (189C) inv stab05 | | |
| 186 | GACCGGGUCCUUUCUUGGAUCAA | 1415 | 31674 | HCVb:204L21 antisense | GGcccAGGAAAGAAccuAGTsT | 1675 |
| | | | | siNA (186C) inv stab05 | | |
| 326 | GCCCCGGGAGGUCUCGUAGACCG | 1416 | 31702 | HCVa:326U21 sense | B cccGGGAGGucucGuAGAcTT B | 1676 |
| | | | | siNA stab07 | | |
| 327 | CCCCGGGAGGUCUCGUAGACCGU | 1417 | 31703 | HCVa:327U21 sense | B ccGGGAGGucucGuAGAccTT B | 1677 |
| | | | | siNA stab07 | | |
| 328 | CCCGGGAGGUCUCGUAGACCGUG | 1418 | 31704 | HCVa:328U21 sense | B cGGGAGGucucGuAGAccGTT B | 1678 |
| | | | | siNA stab07 | | |
| 329 | CCGGGAGGUCUCGUAGACCGUGC | 1419 | 31705 | HCVa:329U21 sense | B GGGAGGucucGuAGAccGuTT B | 1679 |
| | | | | siNA stab07 | | |
| 326 | GCCCCGGGAGGUCUCGUAGACCG | 1416 | 31706 | HCVa:344L21 antisense | GucuAcGAGAccucccGGGTsT | 1680 |
| | | | | siNA (326C) stab08 | | |
| 327 | CCCCGGGAGGUCUCGUAGACCGU | 1417 | 31707 | HCVa:345L21 antisense | GGucuAcGAGAccucccGGTsT | 1681 |
| | | | | siNA (327C) stab08 | | |
| 328 | CCCGGGAGGUCUCGUAGACCGUG | 1418 | 31708 | HCVa:346L21 antisense | cGGucuAcGAGAccucccGTsT | 1682 |
| | | | | siNA (328C) stab08 | | |
| 329 | CCGGGAGGUCUCGUAGACCGUGC | 1419 | 31709 | HCVa:347L21 antisense | AcGGucuAcGAGAccucccTsT | 1683 |
| | | | | siNA (329C) stab08 | | |
| 326 | GCCCCGGGAGGUCUCGUAGACCG | 1416 | 31710 | HCVa:326U21 sense | B cAGAuGcucuGGAGGGcccTT B | 1684 |
| | | | | siNA inv stab07 | | |
| 327 | CCCCGGGAGGUCUCGUAGACCGU | 1417 | 31711 | HCVa:327U21 sense | B ccAGAuGcucuGGAGGGccTT B | 1685 |
| | | | | siNA inv stab07 | | |
| 328 | CCCGGGAGGUCUCGUAGACCGUG | 1418 | 31712 | HCVa:328U21 sense | B GccAGAuGcucuGGAGGGcTT B | 1686 |
| | | | | siNA inv stab07 | | |
| 329 | CCGGGAGGUCUCGUAGACCGUGC | 1419 | 31713 | HCVa:329U21 sense | B uGccAGAuGcucuGGAGGGTT B | 1687 |
| | | | | siNA inv stab07 | | |
| 326 | GCCCCGGGAGGUCUCGUAGACCG | 1416 | 31714 | HCVa:344L21 antisense | GGGcccuccAGAGcAucuGTsT | 1688 |
| | | | | siNA (326C) inv | | |
| | | | | stab08 | | |
| 327 | CCCCGGGAGGUCUCGUAGACCGU | 1417 | 31715 | HCVa:345L21 antisense | GGcccuccAGAGcAucuGGTsT | 1689 |
| | | | | siNA (327C) inv | | |
| | | | | stab08 | | |
| 328 | CCCGGGAGGUCUCGUAGACCGUG | 1418 | 31716 | HCVa:346L21 antisense | GcccuccAGAGcAucuGGcTsT | 1690 |
| | | | | siNA (328C) inv | | |
| | | | | stab08 | | |
| 329 | CCGGGAGGUCUCGUAGACCGUGC | 1419 | 31717 | HCVa:347L21 antisense | cccuccAGAGcAucuGGcATsT | 1691 |
| | | | | siNA (329C) inv | | |
| | | | | stab08 | | |
| 291 | GCCUUGUGGUACUGCCUGAUAGG | 1403 | 31762 | HCVa:291U21 sense | cuuGuGGuAcuGccuGAuATsT | 1692 |
| | | | | siNA stab08 | | |
| 295 | UGUGGUACUGCCUGAUAGGGUGC | 1404 | 31763 | HCVa:295U21 sense | uGGuAcuGccuGAuAGGGuTsT | 1693 |
| | | | | siNA stab08 | | |
| 325 | UGCCCCGGGAGGUCUCGUAGACC | 1394 | 31764 | HCVa:325U21 sense | ccccGGGAGGucucGuAGATsT | 1694 |
| | | | | siNA stab08 | | |
| 291 | GCCUUGUGGUACUGCCUGAUAGG | 1403 | 31765 | HCVa:291U21 sense | AuAGuccGucAuGGuGuucTsT | 1695 |
| | | | | siNA inv stab08 | | |
| 295 | UGUGGUACUGCCUGAUAGGGUGC | 1404 | 31766 | HCVa:295U21 sense | uGGGAuAGuccGucAuGGuTsT | 1696 |
| | | | | siNA inv stab08 | | |
| 325 | UGCCCCGGGAGGUCUCGUAGACC | 1394 | 31767 | HCVa:325U21 sense | AGAuGcucuGGAGGGccccTsT | 1697 |
| | | | | siNA inv stab08 | | |
| 327 | CCCCGGGAGGUCUCGUAGACCGU | 1417 | 31928 | HCVa:327U21 sense | ccGGGAGGucucGuAGAccTsT | 1698 |
| | | | | siNA stab08 | | |
| 327 | CCCCGGGAGGUCUCGUAGACCGU | 1417 | 31929 | HCVa:327U21 sense | ccAGAuGcucuGGAGGGccTsT | 1699 |
| | | | | siNA inv stab08 | | |
| 328 | CCCGGGAGGUCUCGUAGACCGUG | 1418 | 31930 | HCVa:328U21 sense | cGGGAGGucucGuAGAccGTsT | 1700 |
| | | | | siNA stab08 | | |
| 328 | CCCGGGAGGUCUCGUAGACCGUG | 1418 | 31931 | HCVa:328U21 sense | GccAGAuGcucuGGAGGGcTsT | 1701 |
| | | | | siNA inv stab08 | | |
| 327 | CCCCGGGAGGUCUCGUAGACCGU | 1417 | 32007 | HCVa:327U21 sense | B ccGGGAGGucucGuAGAccTsT | 1702 |
| | | | | siNA stab08 + 5′ | | |
| | | | | abasic | | |
| 327 | CCCCGGGAGGUCUCGUAGACCGU | 1417 | 32008 | HCVa:327U21 sense | ccGGGAGGucucGuAGAccTsT B | 1703 |
| | | | | siNA stab08 + 3′ | | |
| | | | | abasic | | |
| 327 | CCCCGGGAGGUCUCGUAGACCGU | 1417 | 32009 | HCVa:327U21 sense | B ccGGGAGGucucGuAGAccTsT B | 1704 |
| | | | | siNA stab08 + 5′ & 3′ | | |
| | | | | abasic | | |
| 327 | CCCCGGGAGGUCUCGUAGACCGU | 1417 | 32174 | HCVa:327 siNA | UCUCGUAGACCUU | 1705 |
| | | | | 3′-classl 10 bp | GGUCUACGAGACCUCCCGGTT | |
| 327 | CCCCGGGAGGUCUCGUAGACCGU | 1417 | 32175 | HCVa:327 siNA | UCGUAGACCUU | 1706 |
| | | | | 3′-classl 8 bp | GGUCUACGAGACCUCCCGGTT | |
| 327 | CCCCGGGAGGUCUCGUAGACCGU | 1417 | 32176 | HCVa:327 siNA | GUAGACCUU GGUCUACGAGACCUCCCGGTT | 1707 |
| | | | | 3′-classl 6 bp | | |
| 327 | CCCCGGGAGGUCUCGUAGACCGU | 1417 | 32177 | HCVa:327 siNA | AGACCUU GGUCUACGAGACCUCCCGGTT | 1708 |
| | | | | 3′-classl 4 bp | | |
| 327 | CCCCGGGAGGUCUCGUAGACCGU | 1417 | 32178 | HCVa:327 siNA | GGUCUACGAGACCUCCCGGUU | 1709 |
| | | | | 5′-classl 10 bp | CCGGGAGGUCU | |
| 327 | CCCCGGGAGGUCUCGUAGACCGU | 1417 | 32179 | HCVa:327 siNA | GGUCUACGAGACCUCCCGGUU | 1710 |
| | | | | 5′-classl 8 bp | CCGGGAGGU | |
| 327 | CCCCGGGAGGUCUCGUAGACCGU | 1417 | 32180 | HCVa:327 siNA | GGUCUACGAGACCUCCCGGUU CCGGGAG | 1711 |
| | | | | 5′-classl 6 bp | | |
| 327 | CCCCGGGAGGUCUCGUAGACCGU | 1417 | 32181 | HCVa:327 siNA | GGUCUACGAGACCUCCCGGUU CCGGG | 1712 |
| | | | | 5′-classl 4 bp | | |
| 327 | CCCCGGGAGGUCUCGUAGACCGU | 1417 | 32182 | HCVa:327 siNA | CUCGUAGACC GAAA | 1713 |
| | | | | 3′-gaaa 10 bp | GGUCUACGAGACCUCCCGGTT | |
| 327 | CCCCGGGAGGUCUCGUAGACCGU | 1417 | 32183 | HCVa:327 siNA | CGUAGACC GAAA | 1714 |
| | | | | 3′-gaaa 8 bp | GGUCUACGAGACCUCCCGGTT | |
| 327 | CCCCGGGAGGUCUCGUAGACCGU | 1417 | 32184 | HCVa:327 siNA | UAGACC GAAA | 1715 |
| | | | | 3′-gaaa 6 bp | GGUCUACGAGACCUCCCGGTT | |
| 327 | CCCCGGGAGGUCUCGUAGACCGU | 1417 | 32185 | HCVa:327 siNA | GACC GAAA GGUCUACGAGACCUCCCGGTT | 1716 |
| | | | | 3′-gaaa 4 bp | | |
| 327 | CCCCGGGAGGUCUCGUAGACCGU | 1417 | 32186 | HCVa:327 siNA | GGUCUACGAGACCUCCCGGUU GAAA | 1717 |
| | | | | 5′-gaaa 10 bp | CCGGGAGGUC | |
| 327 | CCCCGGGAGGUCUCGUAGACCGU | 1417 | 32187 | HCVa:327 siNA | GGUCUACGAGACCUCCCGGUU GAAA | 1718 |
| | | | | 5′-gaaa 8 bp | CCGGGAGG | |
| 327 | CCCCGGGAGGUCUCGUAGACCGU | 1417 | 32188 | HCVa:327 siNA | GGUCUACGAGACCUCCCGGUU GAAA | 1719 |
| | | | | 5′-gaaa 6 bp | CCGGGA | |
| 327 | CCCCGGGAGGUCUCGUAGACCGU | 1417 | 32189 | HCVa:327 siNA | GGUCUACGAGACCUCCCGGUU GAAA CCGG | 1720 |
| | | | | 5′-gaaa 4 bp | | |
| 327 | CCCCGGGAGGUCUCGUAGACCGU | 1417 | 32190 | HCVa:327 siNA | CGUAGACCUU UUUGUGUAG | 1721 |
| | | | | 3′-uuuguguag 10 bp | GGUCUACGAGACCUCCCGGTT | |
| 327 | CCCCGGGAGGUCUCGUAGACCGU | 1417 | 32191 | HCVa:327 siNA | UAGACCUU UUUGUGUAG | 1722 |
| | | | | 3′-uuuguguag 8 bp | GGUCUACGAGACCUCCCGGTT | |
| 327 | CCCCGGGAGGUCUCGUAGACCGU | 1417 | 32192 | HCVa:327 siNA | GACCUU UUUGUGUAG | 1723 |
| | | | | 3′-uuuguguag 6 bp | GGUCUACGAGACCUCCCGGTT | |
| 327 | CCCCGGGAGGUCUCGUAGACCGU | 1417 | 32193 | HCVa:327 siNA | CCUU UUUGUGUAG | 1724 |
| | | | | 3′-uuuguguag 4 bp | GGUCUACGAGACCUCCCGGTT | |
| 327 | CCCCGGGAGGUCUCGUAGACCGU | 1417 | 32194 | HCVa:327 siNA | GGUCUACGAGACCUCCCGGUU UUUGUGUAG | 1725 |
| | | | | 5′-uuuguguag 10 bp | CCGGGAGGUC | |
| 327 | CCCCGGGAGGUCUCGUAGACCGU | 1417 | 32195 | HCVa:327 siNA | GGUCUACGAGACCUCCCGGUU UUUGUGUAG | 1726 |
| | | | | 5′-uuuguguag 8 bp | CCGGGAGG | |
| 327 | CCCCGGGAGGUCUCGUAGACCGU | 1417 | 32196 | HCVa:327 siNA | GGUCUACGAGACCUCCCGGUU UUUGUGUAG | 1727 |
| | | | | 5′-uuuguguag 6 bp | CCGGGA | |
| 327 | CCCCGGGAGGUCUCGUAGACCGU | 1417 | 32197 | HCVa:327 siNA | GGUCUACGAGACCUCCCGGUU UUUGUGUAG | 1728 |
| | | | | 5′-uuuguguag 4 bp | CCGG | |
| 327 | CCCCGGGAGGUCUCGUAGACCGU | 1417 | 32198 | HCVa:345L21 antisense | GGucuAcGAGAccucccGGTsT | 1729 |
| | | | | (327C) stab05 siNA | | |
| 327 | CCCCGGGAGGUCUCGUAGACCGU | 1417 | 32199 | HCVa:345L21 antisense | pGGucuAcGAGAccucccGGTsT | 1730 |
| | | | | (327C) stab05 5′p | | |
| | | | | siNA | | |
| 327 | CCCCGGGAGGUCUCGUAGACCGU | 1417 | 32200 | HCVa:345L21 antisense | sGGucuAcGAGAccucccGGTsT | 1731 |
| | | | | (327C) stab05 5′ps | | |
| | | | | siNA | | |
| 327 | CCCCGGGAGGUCUCGUAGACCGU | 1417 | 32201 | HCVa:345L21 antisense | GGUCUACGAGACCUCCCGGTT | 1732 |
| | | | | (327C) stab00 siNA | | |
| 327 | CCCCGGGAGGUCUCGUAGACCGU | 1417 | 32202 | HCVa:345L21 antisense | pGGUCUACGAGACCUCCCGGTT | 1733 |
| | | | | (327C) v1 5′p siNA | | |
| 327 | CCCCGGGAGGUCUCGUAGACCGU | 1417 | 32203 | HCVa:345L21 antisense | sGGUCUACGAGACCUCCCGGTT | 1734 |
| | | | | (327C) v1 5′ps siNA | | |
| 327 | CCCCGGGAGGUCUCGUAGACCGU | 1417 | 32204 | HCVa:345L21 antisense | pGGUCUACGAGACCUCCCGGGGTT | 1735 |
| | | | | (327C) v2 5′p siNA | | |
| 327 | CCCCGGGAGGUCUCGUAGACCGU | 1417 | 32205 | HCVa:345L21 antisense | pGGUCUACGAGACCUCCCGG UCUCGUA u B | 1736 |
| | | | | (327C) v3 5′p siNA | | |
| 327 | CCCCGGGAGGUCUCGUAGACCGU | 1417 | 32206 | HCVa:345L21 antisense | pGGUCUACGAGACCUCCCGG AGGUCUCGUA | 1737 |
| | | | | (327C) v4 5′p siNA | uu B | |
| 327 | CCCCGGGAGGUCUCGUAGACCGU | 1417 | 32207 | HCVa:345L21 antisense | pGGUCUACGAGACCUCCCGGTT UCUCGUA u | 1738 |
| | | | | (327C) v5 5′p siNA | B | |
| 327 | CCCCGGGAGGUCUCGUAGACCGU | 1417 | 32208 | HCVa:345L21 antisense | pGGUCUACGAGACCUCCCGGTT | 1739 |
| | | | | (327C) v6 5′p siNA | AGGUCUCGUA u B | |
| 327 | CCCCGGGAGGUCUCGUAGACCGU | 1417 | 32501 | HCVa:327U21 sense | B ccGGGAGGucucGuAGAccTT B | 1740 |
| | | | | siNA stab04 | | |
| 325 | UGCCCCGGGAGGUCUCGUAGACC | 1394 | 32502 | HCVa:325U21 sense | B CCCCGGGAGGUCUCGUAGATT B | 1741 |
| | | | | siNA stab09 | | |
| 326 | GCCCCGGGAGGUCUCGUAGACCG | 1416 | 32503 | HCVa:326U21 sense | B CCCGGGAGGUCUCGUAGACTT B | 1742 |
| | | | | siNA stab09 | | |
| 327 | CCCCGGGAGGUCUCGUAGACCGU | 1417 | 32504 | HCVa:327U21 sense | B CCGGGAGGUCUCGUAGACCTT B | 1743 |
| | | | | siNA stab09 | | |
| 328 | CCCGGGAGGUCUCGUAGACCGUG | 1418 | 32505 | HCVa:328U21 sense | B CGGGAGGUCUCGUAGACCGTT B | 1744 |
| | | | | siNA stab09 | | |
| 329 | CCGGGAGGUCUCGUAGACCGUGC | 1419 | 32506 | HCVa:329U21 sense | B GGGAGGUCUCGUAGACCGUTT B | 1745 |
| | | | | siNA stab09 | | |
| 325 | UGCCCCGGGAGGUCUCGUAGACC | 1394 | 32507 | HCVa:343L21 antisense | UCUACGAGACCUCCCGGGGTsT | 1746 |
| | | | | siNA (325C) stab10 | | |
| 326 | GCCCCGGGAGGUCUCGUAGACCG | 1416 | 32508 | HCVa:344L21 antisense | GUCUACGAGACCUCCCGGGTsT | 1747 |
| | | | | siNA (326C) stab10 | | |
| 327 | CCCCGGGAGGUCUCGUAGACCGU | 1417 | 32509 | HCVa:345L21 antisense | GGUCUACGAGACCUCCCGGTsT | 1748 |
| | | | | siNA (327C) stab10 | | |
| 328 | CCCGGGAGGUCUCGUAGACCGUG | 1418 | 32510 | HCVa:346L21 antisense | CGGUCUACGAGACCUCCCGTsT | 1749 |
| | | | | siNA (328C) stab10 | | |
| 329 | CCGGGAGGUCUCGUAGACCGUGC | 1419 | 32511 | HCVa:347L21 antisense | ACGGUCUACGAGACCUCCCTsT | 1750 |
| | | | | siNA (329C) stab10 | | |
| 327 | CCCCGGGAGGUCUCGUAGACCGU | 1417 | 32512 | HCVa:327U21 sense | B ccAGAuGcucuGGAGGGccTT B | 1751 |
| | | | | siNA inv stab04 | | |
| 327 | CCCCGGGAGGUCUCGUAGACCGU | 1417 | 32513 | HCVa:345L21 antisense | GGcccuccAGAGcAucuGGTsT | 1752 |
| | | | | siNA (327C) inv | | |
| | | | | stab05 | | |
| 325 | UGCCCCGGGAGGUCUCGUAGACC | 1394 | 32514 | HCVa:325U21 sense | B AGAUGCUCUGGAGGGCCCCTT B | 1753 |
| | | | | siNA inv stab09 | | |
| 326 | GCCCCGGGAGGUCUCGUAGACCG | 1416 | 32515 | HCVa:326U21 sense | B CAGAUGCUCUGGAGGGCCCTT B | 1754 |
| | | | | siNA inv stab09 | | |
| 327 | CCCCGGGAGGUCUCGUAGACCGU | 1417 | 32516 | HCVa:327U21 sense | B CCAGAUGCUCUGGAGGGCCTT B | 1755 |
| | | | | siNA inv stab09 | | |
| 328 | CCCGGGAGGUCUCGUAGACCGUG | 1418 | 32517 | HCVa:328U21 sense | B GCCAGAUGCUCUGGAGGGCTT B | 1756 |
| | | | | siNA inv stab09 | | |
| 329 | CCGGGAGGUCUCGUAGACCGUGC | 1419 | 32518 | HCVa:329U21 sense | B UGCCAGAUGCUCUGGAGGGTT B | 1757 |
| | | | | siNA inv stab09 | | |
| 325 | UGCCCCGGGAGGUCUCGUAGACC | 1394 | 32519 | HCVa:343L21 antisense | GGGGCCCUCCAGAGCAUCUTsT | 1758 |
| | | | | siNA (325C) inv | | |
| | | | | stab10 | | |
| 326 | GCCCCGGGAGGUCUCGUAGACCG | 1416 | 32520 | HCVa:344L21 antisense | GGGCCCUCCAGAGCAUCUGTsT | 1759 |
| | | | | siNA (326C) inv | | |
| | | | | stab10 | | |
| 327 | CCCCGGGAGGUCUCGUAGACCGU | 1417 | 32521 | HCVa:345L21 antisense | GGCCCUCCAGAGCAUCUGGTsT | 1760 |
| | | | | siNA (327C) inv | | |
| | | | | stab10 | | |
| 328 | CCCGGGAGGUCUCGUAGACCGUG | 1418 | 32522 | HCVa:346L21 antisense | GCCCUCCAGAGCAUCUGGCTsT | 1761 |
| | | | | siNA (328C) inv | | |
| | | | | stab10 | | |
| 329 | CCGGGAGGUCUCGUAGACCGUGC | 1419 | 32523 | HCVa:347L21 antisense | CCCUCCAGAGCAUCUGGCATsT | 1762 |
| | | | | siNA (329C) inv | | |
| | | | | stab10 | | |
| 295 | UGUGGUACUGCCUGAUAGGGUGC | 1404 | 32714 | HCVa:313L21 antisense | pACCCUAUCAGGCAGUACCA | 1763 |
| | | | | siNA (295C) v1 5′p | GUACUGCCUGAU B | |
| | | | | palindrome | | |
| 295 | UGUGGUACUGCCUGAUAGGGUGC | 1404 | 32715 | HCVa:313L21 antisense | pACCCUAUCAGGCAGUACC | 1764 |
| | | | | siNA (295C) v2 5′p | GGUACUGCCUGAU B | |
| | | | | palindrome | | |
| 327 | CCCCGGGAGGUCUCGUAGACCGU | 1417 | 32716 | HCVa 5′p-345L21 | pGGUCUACGAGACCUCCCGG | 1765 |
| | | | | antisense (327C) v5 | AGGUCUCGUAGA B | |
| | | | | 5′p palindrome siNA | | |
| 327 | CCCCGGGAGGUCUCGUAGACCGU | 1417 | 32717 | HCVa 5′p-345L21 | pGGUCUACGAGACCUCC GGAGGUCUCGUA B | 1766 |
| | | | | antisense (327C) v6 | | |
| | | | | 5′p palindrome siNA | | |
| 291 | GCCUUGUGGUACUGCCUGAUAGG | 1403 | 32796 | HCVa:309L21 antisense | uAucAgGcaguaccAcaAgTsT | 1767 |
| | | | | siNA (291C) stab08 | | |
| | | | | mod pair to #30651 | | |
| 295 | UGUGGUACUGCCUGAUAGGGUGC | 1404 | 32797 | HCVa:313L21 antisense | acccuaucaggcaguAccaTsT | 1768 |
| | | | | siNA (295C) stab08 | | |
| | | | | mod pair to #30652 | | |
| 303 | UGCCUGAUAGGGUGCUUGCGAGU | 1410 | 32798 | HCVa:321L21 antisense | ucgcaaGcacccuAucaggTsT | 1769 |
| | | | | siNA (303C) stab08 | | |
| | | | | mod pair to #30658 | | |
| 306 | CUGAUAGGGUGCUUGCGAGUGCC | 1411 | 32799 | HCVa:324L21 antisense | cacucgcAagcacccuaucTsT | 1770 |
| | | | | siNA (306C) stab08 | | |
| | | | | mod A pair to #30659 | | |
| 306 | CUGAUAGGGUGCUUGCGAGUGCC | 1411 | 32800 | HCVa:324L21 antisense | cAcucgcAagcacccuaucTsT | 1771 |
| | | | | siNA (306C) stab08 | | |
| | | | | mod B pair to #30659 | | |
| 140 | UCCCGGGAGAGCCAUAGUGGUCU | 1420 | 33125 | HCVa:140U21 sense | B ccGGGAGAGccAuAGuGGuTT B | 1772 |
| | | | | siNA stab07 | | |
| 141 | CCCGGGAGAGCCAUAGUGGUCUG | 1421 | 33126 | HCVa:141U21 sense | B cGGGAGAGccAuAGuGGucTT B | 1773 |
| | | | | siNA stab07 | | |
| 142 | CCGGGAGAGCCAUAGUGGUCUGC | 1422 | 33127 | HCVa:142U21 sense | B GGGAGAGccAuAGuGGucuTT B | 1774 |
| | | | | siNA stab07 | | |
| 154 | UAGUGGUCUGCGGAACCGGUGAG | 1423 | 33128 | HCVa:154U21 sense | B GuGGucuGcGGAAccGGuGTT B | 1775 |
| | | | | siNA stab07 | | |
| 155 | AGUGGUCUGCGGAACCGGUGAGU | 1424 | 33129 | HCVa:155U21 sense | B uGGucuGcGGAAccGGuGATT B | 1776 |
| | | | | siNA stab07 | | |
| 156 | GUGGUCUGCGGAACCGGUGAGUA | 1425 | 33130 | HCVa:156U21 sense | B GGucuGcGGAAccGGuGAGTT B | 1777 |
| | | | | siNA stab07 | | |
| 157 | UGGUCUGCGGAACCGGUGAGUAC | 1426 | 33131 | HCVa:157U21 sense | B GucuGcGGAAccGGuGAGuTT B | 1778 |
| | | | | siNA stab07 | | |
| 158 | GGUCUGCGGAACCGGUGAGUACA | 1427 | 33132 | HCVa:158U21 sense | B ucuGcGGAAccGGuGAGuATT B | 1779 |
| | | | | siNA stab07 | | |
| 160 | UCUGCGGAACCGGUGAGUACACC | 1428 | 33133 | HCVa:160U21 sense | B uGcGGAAccGGuGAGuAcATT B | 1780 |
| | | | | siNA stab07 | | |
| 161 | CUGCGGAACCGGUGAGUACACCG | 1429 | 33134 | HCVa:161U21 sense | B GcGGAAccGGuGAGuAcAcTT B | 1781 |
| | | | | siNA stab07 | | |
| 164 | CGGAACCGGUGAGUACACCGGAA | 1430 | 33135 | HCVa:164U21 sense | B GAAccGGuGAGuAcAccGGTT B | 1782 |
| | | | | siNA stab07 | | |
| 165 | GGAACCGGUGAGUACACCGGAAU | 1431 | 33136 | HCVa:165U21 sense | B AAccGGuGAGuAcAccGGATT B | 1783 |
| | | | | siNA stab07 | | |
| 166 | GAACCGGUGAGUACACCGGAAUU | 1432 | 33137 | HCVa:166U21 sense | B AccGGuGAGuAcAccGGAATT B | 1784 |
| | | | | siNA stab07 | | |
| 167 | AACCGGUGAGUACACCGGAAUUG | 1433 | 33138 | HCVa:167U21 sense | B ccGGuGAGuAcAccGGAAuTT B | 1785 |
| | | | | siNA stab07 | | |
| 282 | UCGCGAAAGGCCUUGUGGUACUG | 1434 | 33139 | HCVa:282U21 sense | B GcGAAAGGccuuGuGGuAcTT B | 1786 |
| | | | | siNA stab07 | | |
| 283 | CGCGAAAGGCCUUGUGGUACUGC | 1435 | 33140 | HCVa:283U21 sense | B cGAAAGGccuuGuGGuAcuTT B | 1787 |
| | | | | siNA stab07 | | |
| 284 | GCGAAAGGCCUUGUGGUACUGCC | 1436 | 33141 | HCVa:284U21 sense | B GAAAGGccuuGuGGuAcuGTT B | 1788 |
| | | | | siNA stab07 | | |
| 285 | CGAAAGGCCUUGUGGUACUGCCU | 1437 | 33142 | HCVa:285U21 sense | B AAAGGccuuGuGGuAcuGcTT B | 1789 |
| | | | | siNA stab07 | | |
| 286 | GAAAGGCCUUGUGGUACUGCCUG | 1438 | 33143 | HCVa:286U21 sense | B AAGGccuuGuGGuAcuGccTT B | 1790 |
| | | | | siNA stab07 | | |
| 288 | AAGGCCUUGUGGUACUGCCUGAU | 1439 | 33144 | HCVa:288U21 sense | B GGccuuGuGGuAcuGccuGTT B | 1791 |
| | | | | siNA stab07 | | |
| 289 | AGGCCUUGUGGUACUGCCUGAUA | 1440 | 33145 | HCVa:289U21 sense | B GccuuGuGGuAcuGccuGATT B | 1792 |
| | | | | siNA stab07 | | |
| 290 | GGCCUUGUGGUACUGCCUGAUAG | 1441 | 33146 | HCVa:290U21 sense | B ccuuGuGGuAcuGccuGAuTT B | 1793 |
| | | | | siNA stab07 | | |
| 299 | GUACUGCCUGAUAGGGUGCUUGC | 1442 | 33147 | HCVa:299U21 sense | B AcuGccuGAuAGGGuGcuuTT B | 1794 |
| | | | | siNA stab07 | | |
| 302 | CUGCCUGAUAGGGUGCUUGCGAG | 1443 | 33148 | HCVa:302U21 sense | B GccuGAuAGGGuGcuuGcGTT B | 1795 |
| | | | | siNA stab07 | | |
| 304 | GCCUGAUAGGGUGCUUGCGAGUG | 1444 | 33149 | HCVa:304U21 sense | B cuGAuAGGGuGcuuGcGAGTT B | 1796 |
| | | | | siNA stab07 | | |
| 305 | CCUGAUAGGGUGCUUGCGAGUGC | 1445 | 33150 | HCVa:305U21 sense | B uGAuAGGGuGcuuGcGAGuTT B | 1797 |
| | | | | siNA stab07 | | |
| 307 | UGAUAGGGUGCUUGCGAGUGCCC | 1446 | 33151 | HCVa:307U21 sense | B AuAGGGuGcuuGcGAGuGcTT B | 1798 |
| | | | | siNA stab07 | | |
| 308 | GAUAGGGUGCUUGCGAGUGCCCC | 1447 | 33152 | HCVa:308U21 sense | B uAGGGuGcuuGcGAGuGccTT B | 1799 |
| | | | | siNA stab07 | | |
| 310 | UAGGGUGCUUGCGAGUGCCCCGG | 1448 | 33153 | HCVa:310U21 sense | B GGGuGcuuGcGAGuGccccTT B | 1800 |
| | | | | siNA stab07 | | |
| 311 | AGGGUGCUUGCGAGUGCCCCGGG | 1449 | 33154 | HCVa:311U21 sense | B GGuGcuuGcGAGuGccccGTT B | 1801 |
| | | | | siNA stab07 | | |
| 314 | GUGCUUGCGAGUGCCCCGGGAGG | 1450 | 33155 | HCVa:314U21 sense | B GcuuGcGAGuGccccGGGATT B | 1802 |
| | | | | siNA stab07 | | |
| 315 | UGCUUGCGAGUGCCCCGGGAGGU | 1451 | 33156 | HCVa:315U21 sense | B cuuGcGAGuGccccGGGAGTT B | 1803 |
| | | | | siNA stab07 | | |
| 316 | GCUUGCGAGUGCCCCGGGAGGUC | 1452 | 33157 | HCVa:316U21 sense | B uuGcGAGuGccccGGGAGGTT B | 1804 |
| | | | | siNA stab07 | | |
| 317 | CUUGCGAGUGCCCCGGGAGGUCU | 1453 | 33158 | HCVa:317U21 sense | B uGcGAGuGccccGGGAGGuTT B | 1805 |
| | | | | siNA stab07 | | |
| 318 | UUGCGAGUGCCCCGGGAGGUCUC | 1454 | 33159 | HCVa:318U21 sense | B GcGAGuGccccGGGAGGucTT B | 1806 |
| | | | | siNA stab07 | | |
| 319 | UGCGAGUGCCCCGGGAGGUCUCG | 1455 | 33160 | HCVa:319U21 sense | B cGAGuGccccGGGAGGucuTT B | 1807 |
| | | | | siNA stab07 | | |
| 320 | GCGAGUGCCCCGGGAGGUCUCGU | 1456 | 33161 | HCVa:320U21 sense | B GAGuGccccGGGAGGucucTT B | 1808 |
| | | | | siNA stab07 | | |
| 322 | GAGUGCCCCGGGAGGUCUCGUAG | 1457 | 33162 | HCVa:322U21 sense | B GuGccccGGGAGGucucGuTT B | 1809 |
| | | | | siNA stab07 | | |
| 323 | AGUGCCCCGGGAGGUCUCGUAGA | 1458 | 33163 | HCVa:323U21 sense | B uGccccGGGAGGucucGuATT B | 1810 |
| | | | | siNA stab07 | | |
| 330 | CGGGAGGUCUCGUAGACCGUGCA | 1459 | 33164 | HCVa:330U21 sense | B GGAGGucucGuAGAccGuGTT B | 1811 |
| | | | | siNA stab07 | | |
| 140 | UCCCGGGAGAGCCAUAGUGGUCU | 1420 | 33165 | HCVa:158L21 antisense | AccAcuAuGGcucucccGGTsT | 1812 |
| | | | | siNA (140C) stab08 | | |
| 141 | CCCGGGAGAGCCAUAGUGGUCUG | 1421 | 33166 | HCVa:159L21 antisense | GaccAcuAuGGcucucccGTsT | 1813 |
| | | | | siNA (141C) stab08 | | |
| 142 | CCGGGAGAGCCAUAGUGGUCUGC | 1422 | 33167 | HCVa:160L21 antisense | AGAccAcuAuGGcucucccTsT | 1814 |
| | | | | siNA (142C) stab08 | | |
| 154 | UAGUGGUCUGCGGAACCGGUGAG | 1423 | 33168 | HCVa:172L21 antisense | cAccGGuuccGcAGAccAcTsT | 1815 |
| | | | | siNA (154C) stab08 | | |
| 155 | AGUGGUCUGCGGAACCGGUGAGU | 1424 | 33169 | HCVa:173L21 antisense | ucAccGGuuccGcAGAccATsT | 1816 |
| | | | | siNA (155C) stab08 | | |
| 156 | GUGGUCUGCGGAACCGGUGAGUA | 1425 | 33170 | HCVa:174L21 antisense | cucAccGGuuccGcAGAccTsT | 1817 |
| | | | | siNA (156C) stab08 | | |
| 157 | UGGUCUGCGGAACCGGUGAGUAC | 1426 | 33171 | HCVa:175L21 antisense | AcucAccGGuuccGcAGAcTsT | 1818 |
| | | | | siNA (157C) stab08 | | |
| 158 | GGUCUGCGGAACCGGUGAGUACA | 1427 | 33172 | HCVa:176L21 antisense | uAcucAccGGuuccGcAGATsT | 1819 |
| | | | | siNA (158C) stab08 | | |
| 160 | UCUGCGGAACCGGUGAGUACACC | 1428 | 33173 | HCVa:178L21 antisense | uGuAcucAccGGuuccGcATsT | 1820 |
| | | | | siNA (160C) stab08 | | |
| 161 | CUGCGGAACCGGUGAGUACACCG | 1429 | 33174 | HCVa:179L21 antisense | GuGuAcucAccGGuuccGcTsT | 1821 |
| | | | | siNA (161C) stab08 | | |
| 164 | CGGAACCGGUGAGUACACCGGAA | 1430 | 33175 | HCVa:182L21 antisense | ccGGuGuAcucAccGGuucTsT | 1822 |
| | | | | siNA (164C) stab08 | | |
| 165 | GGAACCGGUGAGUACACCGGAAU | 1431 | 33176 | HCVa:183L21 antisense | uccGGuGuAcucAccGGuuTsT | 1823 |
| | | | | siNA (165C) stab08 | | |
| 166 | GAACCGGUGAGUACACCGGAAUU | 1432 | 33177 | HCVa:184L21 antisense | uuccGGuGuAcucAccGGuTsT | 1824 |
| | | | | siNA (166C) stab08 | | |
| 167 | AACCGGUGAGUACACCGGAAUUG | 1433 | 33178 | HCVa:185L21 antisense | AuuccGGuGuAcucAccGGTsT | 1825 |
| | | | | siNA (167C) stab08 | | |
| 282 | UCGCGAAAGGCCUUGUGGUACUG | 1434 | 33179 | HCVa:300L21 antisense | GuAccAcAAGGccuuucGcTsT | 1826 |
| | | | | siNA (282C) stab08 | | |
| 283 | CGCGAAAGGCCUUGUGGUACUGC | 1435 | 33180 | HCVa:301L21 antisense | AGuAccAcAAGGccuuucGTsT | 1827 |
| | | | | siNA (283C) stab08 | | |
| 284 | GCGAAAGGCCUUGUGGUACUGCC | 1436 | 33181 | HCVa:302L21 antisense | cAGuAccAcAAGGccuuucTsT | 1828 |
| | | | | siNA (284C) stab08 | | |
| 285 | CGAAAGGCCUUGUGGUACUGCCU | 1437 | 33182 | HCVa:303L21 antisense | GcAGuAccAcAAGGccuuuTsT | 1829 |
| | | | | siNA (285C) stab08 | | |
| 286 | GAAAGGCCUUGUGGUACUGCCUG | 1438 | 33183 | HCVa:304L21 antisense | GGcAGuAccAcAAGGccuuTsT | 1830 |
| | | | | siNA (286C) stab08 | | |
| 288 | AAGGCCUUGUGGUACUGCCUGAU | 1439 | 33184 | HCVa:306L21 antisense | cAGGcAGuAccAcAAGGccTsT | 1831 |
| | | | | siNA (288C) stab08 | | |
| 289 | AGGCCUUGUGGUACUGCCUGAUA | 1440 | 33185 | HCVa:307L21 antisense | ucAGGcAGuAccAcAAGGcTsT | 1832 |
| | | | | siNA (289C) stab08 | | |
| 290 | GGCCUUGUGGUACUGCCUGAUAG | 1441 | 33186 | HCVa:308L21 antisense | AucAGGcAGuAccAcAAGGTsT | 1833 |
| | | | | siNA (290C) stab08 | | |
| 299 | GUACUGCCUGAUAGGGUGCUUGC | 1442 | 33187 | HCVa:317L21 antisense | AAGcAcccuAucAGGcAGuTsT | 1834 |
| | | | | siNA (299C) stab08 | | |
| 302 | CUGCCUGAUAGGGUGCUUGCGAG | 1443 | 33188 | HCVa:320L21 antisense | cGcAAGcAcccuAucAGGcTsT | 1835 |
| | | | | siNA (302C) stab08 | | |
| 304 | GCCUGAUAGGGUGCUUGCGAGUG | 1444 | 33189 | HCVa:322L21 antisense | cucGcAAGcAcccuAucAGTsT | 1836 |
| | | | | siNA (304C) stab08 | | |
| 305 | CCUGAUAGGGUGCUUGCGAGUGC | 1445 | 33190 | HCVa:323L21 antisense | AcucGcAAGcAcccuAucATsT | 1837 |
| | | | | siNA (305C) stab08 | | |
| 307 | UGAUAGGGUGCUUGCGAGUGCCC | 1446 | 33191 | HCVa:325L21 antisense | GcAcucGcAAGcAcccuAuTsT | 1838 |
| | | | | siNA (307C) stab08 | | |
| 308 | GAUAGGGUGCUUGCGAGUGCCCC | 1447 | 33192 | HCVa:326L21 antisense | GGcAcucGcAAGcAcccuATsT | 1839 |
| | | | | siNA (308C) stab08 | | |
| 310 | UAGGGUGCUUGCGAGUGCCCCGG | 1448 | 33193 | HCVa:328L21 antisense | GGGGcAcucGcAAGcAcccTsT | 1840 |
| | | | | siNA (310C) stab08 | | |
| 311 | AGGGUGCUUGCGAGUGCCCCGGG | 1449 | 33194 | HCVa:329L21 antisense | cGGGGcAcucGcAAGcAccTsT | 1841 |
| | | | | siNA (311C) stab08 | | |
| 314 | GUGCUUGCGAGUGCCCCGGGAGG | 1450 | 33195 | HCVa:332L21 antisense | ucccGGGGcAcucGcAAGcTsT | 1842 |
| | | | | siNA (314C) stab08 | | |
| 315 | UGCUUGCGAGUGCCCCGGGAGGU | 1451 | 33196 | HCVa:333L21 antisense | cucccGGGGcAcucGcAAGTsT | 1843 |
| | | | | siNA (315C) stab08 | | |
| 316 | GCUUGCGAGUGCCCCGGGAGGUC | 1452 | 33197 | HCVa:334L21 antisense | ccucccGGGGcAcucGcAATsT | 1844 |
| | | | | siNA (316C) stab08 | | |
| 317 | CUUGCGAGUGCCCCGGGAGGUCU | 1453 | 33198 | HCVa:335L21 antisense | AccucccGGGGcAcucGcATsT | 1845 |
| | | | | siNA (317C) stab08 | | |
| 318 | UUGCGAGUGCCCCGGGAGGUCUC | 1454 | 33199 | HCVa:336L21 antisense | GAccucccGGGGcAcucGcTsT | 1846 |
| | | | | siNA (318C) stab08 | | |
| 319 | UGCGAGUGCCCCGGGAGGUCUCG | 1455 | 33200 | HCVa:337L21 antisense | AGAccucccGGGGcAcucGTsT | 1847 |
| | | | | siNA (319C) stab08 | | |
| 320 | GCGAGUGCCCCGGGAGGUCUCGU | 1456 | 33201 | HCVa:338L21 antisense | GAGAccucccGGGGcAcucTsT | 1848 |
| | | | | siNA (320C) stab08 | | |
| 322 | GAGUGCCCCGGGAGGUCUCGUAG | 1457 | 33202 | HCVa:340L21 antisense | AcGAGAccucccGGGGcAcTsT | 1849 |
| | | | | siNA (322C) stab08 | | |
| 323 | AGUGCCCCGGGAGGUCUCGUAGA | 1458 | 33203 | HCVa:341L21 antisense | uAcGAGAccucccGGGGcATsT | 1850 |
| | | | | siNA (323C) stab08 | | |
| 330 | CGGGAGGUCUCGUAGACCGUGCA | 1459 | 33204 | HCVa:348L21 antisense | cAcGGucuAcGAGAccuccTsT | 1851 |
| | | | | siNA (330C) stab08 | | |
| 303 | UGCCUGAUAGGGUGCUUGCGAGU | 1410 | 33329 | HCVa:321L21 antisense | pucGcAAGcAcccuAucAGGTsT | 1852 |
| | | | | siNA (303C) stab08 + | | |
| | | | | 5′ P | | |
| 303 | UGCCUGAUAGGGUGCUUGCGAGU | 1410 | 33330 | HCVa:321L21 antisense | pucGcAAGcAcccuAucAGGTsT | 1853 |
| | | | | siNA (303C) stab05 + | | |
| | | | | 5′ P | | |
| 295 | UGUGGUACUGCCUGAUAGGGUGC | 1404 | 33331 | HCVa:313L21 antisense | pAcccuAucAGGcAGuAccATsT | 1854 |
| | | | | siNA (295C) stab05 + | | |
| | | | | 5′ P | | |
| 295 | UGUGGUACUGCCUGAUAGGGUGC | 1404 | 33332 | HCVa:313L21 antisense | pAcccuAucAGGcAGuAccATsT | 1855 |
| | | | | siNA (295C) stab08 + | | |
| | | | | 5′ P | | |
| 306 | CUGAUAGGGUGCUUGCGAGUGCC | 1411 | 33333 | HCVa:324L21 antisense | pcAcucGcAAGcAcccuAucTsT | 1856 |
| | | | | siNA (306C) stab08 + | | |
| | | | | 5′ P | | |
| 327 | CCCCGGGAGGUCUCGUAGACCGU | 1417 | 33334 | HCVa:345L21 antisense | pGGucuAcGAGAccucccGGTsT | 1857 |
| | | | | siNA (327C) stab08 + | | |
| | | | | 5′ P | | |
| 303 | UGCCUGAUAGGGUGCUUGCGAGU | 1410 | 33346 | HCVa:321L21 antisense | L ucGcAAGcAcccuAucAGGTsT | 1858 |
| | | | | siNA (303C) stab08 + | | |
| | | | | 5′ aminoL | | |
| 303 | UGCCUGAUAGGGUGCUUGCGAGU | 1410 | 33347 | HCVa:321L21 antisense | L ucGcAAGcAcccuAucAGGTsT | 1859 |
| | | | | siNA (303C) stab05 + | | |
| | | | | 5′ aminoL | | |
| 295 | UGUGGUACUGCCUGAUAGGGUGC | 1404 | 33348 | HCVa:313L21 antisense | L AcccuAucAGGcAGuAccATsT | 1860 |
| | | | | siNA (295C) stab05 + | | |
| | | | | 5′ aminoL | | |
| 295 | UGUGGUACUGCCUGAUAGGGUGC | 1404 | 33349 | HCVa:313L21 antisense | L AcccuAucAGGcAGuAccATsT | 1861 |
| | | | | siNA (295C) stab08 + | | |
| | | | | 5′ aminoL | | |
| 306 | CUGAUAGGGUGCUUGCGAGUGCC | 1411 | 33350 | HCVa:324L21 antisense | L cAcucGcAAGcAcccuAucTsT | 1862 |
| | | | | siNA (306C) stab08 + | | |
| | | | | 5′ aminoL | | |
| 327 | CCCCGGGAGGUCUCGUAGACCGU | 1417 | 33351 | HCVa:345L21 antisense | L GGucuAcGAGAccucccGGTsT | 1863 |
| | | | | siNA (327C) stab08 + | | |
| | | | | 5′ aminoL | | |
| 327 | CCCCGGGAGGUCUCGUAGACCGU | 1417 | 34024 | HCVa:327U21 sense | B ccGAGAGGucGcGuAGuccTT B | 1864 |
| | | | | siNA inact1 stab07 | | |
| 327 | CCCCGGGAGGUCUCGUAGACCGU | 1417 | 34025 | HCVa:327U21 sense | B ccGAGAGGucGcGucGAucTT B | 1865 |
| | | | | siNA inact2 stab07 | | |
| 327 | CCCCGGGAGGUCUCGUAGACCGU | 1417 | 34026 | HCVa:327U21 sense | B ccGGuAGGucccGuGGAcATT B | 1866 |
| | | | | siNA inact3 stab07 | | |
| 327 | CCCCGGGAGGUCUCGUAGACCGU | 1417 | 34027 | HCVa:345L21 antisense | GGAcuAcGcGAccucucGGTsT | 1867 |
| | | | | siNA (327C) inact1 | | |
| | | | | stab08 | | |
| 327 | CCCCGGGAGGUCUCGUAGACCGU | 1417 | 34028 | HCVa:345L21 antisense | GAucGAcGcGAccucucGGTsT | 1868 |
| | | | | siNA (327C) inact2 | | |
| | | | | stab08 | | |
| 327 | CCCCGGGAGGUCUCGUAGACCGU | 1417 | 34029 | HCVa:345L21 antisense | uGuccAcGGGAccuAccGGTsT | 1869 |
| | | | | siNA (327C) inact3 | | |
| | | | | stab08 | | |
| 282 | UCGCGAAAGGCCUUGUGGUACUG | 1434 | 34030 | HCVa:282U21 sense | B GcuAAAGGcGuuGuGGcAcTT B | 1870 |
| | | | | siNA inact1 stab07 | | |
| 282 | UCGCGAAAGGCCUUGUGGUACUG | 1434 | 34031 | HCVa:282U21 sense | B GcGuAAGGcccuGuGGuAATT B | 1871 |
| | | | | siNA inact2 stab07 | | |
| 282 | UCGCGAAAGGCCUUGUGGUACUG | 1434 | 34032 | HCVa:282U21 sense | B GAGAAAcGccuGGuGGuucTT B | 1872 |
| | | | | siNA inact3 stab07 | | |
| 283 | CGCGAAAGGCCUUGUGGUACUGC | 1435 | 34033 | HCVa:283U21 sense | B cGuAAGGcAuuGuGGcAcuTT B | 1873 |
| | | | | siNA inact1 stab07 | | |
| 283 | CGCGAAAGGCCUUGUGGUACUGC | 1435 | 34034 | HCVa:283U21 sense | B cGAGAGGcAuuGuGcuAcuTT B | 1874 |
| | | | | siNA inact2 stab07 | | |
| 283 | CGCGAAAGGCCUUGUGGUACUGC | 1435 | 34035 | HCVa:283U21 sense | B ccAAAGGucuuGAGGuGcuTT B | 1875 |
| | | | | siNA inact3 stab07 | | |
| 304 | GCCUGAUAGGGUGCUUGCGAGUG | 1444 | 34036 | HCVa:304U21 sense | B cGGAuAGGcuGcuuGuGAGTT B | 1876 |
| | | | | siNA inact1 stab07 | | |
| 304 | GCCUGAUAGGGUGCUUGCGAGUG | 1444 | 34037 | HCVa:304U21 sense | B cuGcuAGGGuAcuuGGGAGTT B | 1877 |
| | | | | siNA inact2 stab07 | | |
| 304 | GCCUGAUAGGGUGCUUGCGAGUG | 1444 | 34038 | HCVa:304U21 sense | B ccGAuAuGGuGAuuGcGGGTT B | 1878 |
| | | | | siNA inact3 stab07 | | |
| 307 | UGAUAGGGUGCUUGCGAGUGCCC | 1446 | 34039 | HCVa:307U21 sense | B AuuGGGuGcuGGcGAGuAcTT B | 1879 |
| | | | | siNA inact1 stab07 | | |
| 307 | UGAUAGGGUGCUUGCGAGUGCCC | 1446 | 34040 | HCVa:307U21 sense | B AuAuGGuGccuGcGAGuGGTT B | 1880 |
| | | | | siNA inact2 stab07 | | |
| 307 | UGAUAGGGUGCUUGCGAGUGCCC | 1446 | 34041 | HCVa:307U21 sense | B AGAGGGuAcuuGcGcGuGuTT B | 1881 |
| | | | | siNA inact3 stab07 | | |
| 282 | UCGCGAAAGGCCUUGUGGUACUG | 1434 | 34042 | HCVa:300L21 antisense | GuGccAcAAcGccuuuAGcTsT | 1882 |
| | | | | siNA (282C) inact1 | | |
| | | | | stab08 | | |
| 282 | UCGCGAAAGGCCUUGUGGUACUG | 1434 | 34043 | HCVa:300L21 antisense | uuAccAcAGGGccuuAcGcTsT | 1883 |
| | | | | siNA (282C) inact2 | | |
| | | | | stab08 | | |
| 282 | UCGCGAAAGGCCUUGUGGUACUG | 1434 | 34044 | HCVa:300L21 antisense | GAAccAccAGGcGuuucucTsT | 1884 |
| | | | | siNA (282C) inact3 | | |
| | | | | stab08 | | |
| 283 | CGCGAAAGGCCUUGUGGUACUGC | 1435 | 34045 | HCVa:301L21 antisense | AguGccAcAAuGccuuAcGTsT | 1885 |
| | | | | siNA (283C) inact1 | | |
| | | | | stab08 | | |
| 283 | CGCGAAAGGCCUUGUGGUACUGC | 1435 | 34046 | HCVa:301L21 antisense | AguAGcAcAAuGccucucGTsT | 1886 |
| | | | | siNA (283C) inact2 | | |
| | | | | stab08 | | |
| 283 | CGCGAAAGGCCUUGUGGUACUGC | 1435 | 34047 | HCVa:301L21 antisense | AGcAccucAAGAccuuuGGTsT | 1887 |
| | | | | siNA (283C) inact3 | | |
| | | | | stab08 | | |
| 304 | GCCUGAUAGGGUGCUUGCGAGUG | 1444 | 34048 | HCVa:322L21 antisense | cucAcAAGcAGccuAuccGTsT | 1888 |
| | | | | siNA (304C) inact1 | | |
| | | | | stab08 | | |
| 304 | GCCUGAUAGGGUGCUUGCGAGUG | 1444 | 34049 | HCVa:322L21 antisense | cucccAAGuAcccuAGcAGTsT | 1889 |
| | | | | siNA (304C) inact2 | | |
| | | | | stab08 | | |
| 304 | GCCUGAUAGGGUGCUUGCGAGUG | 1444 | 34050 | HCVa:322L21 antisense | cccGcAAucAccAuAucGGTsT | 1890 |
| | | | | siNA (304C) inact3 | | |
| | | | | stab08 | | |
| 307 | UGAUAGGGUGCUUGCGAGUGCCC | 1446 | 34051 | HCVa:325L21 antisense | GuAcucGccAGcAcccAAuTsT | 1891 |
| | | | | siNA (307C) inact1 | | |
| | | | | stab08 | | |
| 307 | UGAUAGGGUGCUUGCGAGUGCCC | 1446 | 34052 | HCVa:325L21 antisense | ccAcucGcAGGcAccAuAuTsT | 1892 |
| | | | | siNA (307C) inact2 | | |
| | | | | stab08 | | |
| 307 | UGAUAGGGUGCUUGCGAGUGCCC | 1446 | 34053 | HCVa:325L21 antisense | AcAcGcGcAAGuAcccucuTsT | 1893 |
| | | | | siNA (307C) inact3 | | |
| | | | | stab08 | | |
| 282 | UCGCGAAAGGCCUUGUGGUACUG | 1434 | 34054 | HCVa:282U21 sense | B cAuGGuGuuccGGAAAGcGTT B | 1894 |
| | | | | siNA inv stab07 | | |
| 283 | CGCGAAAGGCCUUGUGGUACUGC | 1435 | 34055 | HCVa:283U21 sense | B ucAuGGuGuuccGGAAAGcTT B | 1895 |
| | | | | siNA inv stab07 | | |
| 304 | GCCUGAUAGGGUGCUUGCGAGUG | 1444 | 34056 | HCVa:304U21 sense | B GAGcGuucGuGGGAuAGucTT B | 1896 |
| | | | | siNA inv stab07 | | |
| 307 | UGAUAGGGUGCUUGCGAGUGCCC | 1446 | 34057 | HCVa:307U21 sense | B cGuGAGcGuucGuGGGAuATT B | 1897 |
| | | | | siNA inv stab07 | | |
| 282 | UCGCGAAAGGCCUUGUGGUACUG | 1434 | 34058 | HCVa:300L21 antisense | cGcuuuccGGAAcAccAuGTsT | 1898 |
| | | | | siNA (282C) inv | | |
| | | | | stab08 | | |
| 283 | CGCGAAAGGCCUUGUGGUACUGC | 1435 | 34059 | HCVa:301L21 antisense | GcuuuccGGAAcAccAuGATsT | 1899 |
| | | | | siNA (283C) inv | | |
| | | | | stab08 | | |
| 304 | GCCUGAUAGGGUGCUUGCGAGUG | 1444 | 34060 | HCVa:322L21 antisense | GAcuAucccAcGAAcGcucTsT | 1900 |
| | | | | siNA (304C) inv | | |
| | | | | stab08 | | |
| 307 | UGAUAGGGUGCUUGCGAGUGCCC | 1446 | 34061 | HCVa:325L21 antisense | uAucccAcGAAcGcucAcGTsT | 1901 |
| | | | | siNA (307C) inv | | |
| | | | | stab08 | | |
| 82 | UAGCCAUGGCGUUAGUAUGAGUG | 1460 | 34128 | HCVb:100L18 (82C) 5′p | pUCAUACUAACGCCAUGGC GUUAGUAUGAB | 1902 |
| | | | | palindrome siNA | | |
| 82 | UAGCCAUGGCGUUAGUAUGAGUG | 1460 | 34129 | HCVb:100L17 (82C) 5′p | pCAUACUAACGCCAUGGC GUUAGUAUGB | 1903 |
| | | | | palindrome siNA | | |
| 82 | UAGCCAUGGCGUUAGUAUGAGUG | 1460 | 34130 | HCVb:100L16 (82C) 5′p | pAUACUAACGCCAUGGC GUUAGUAUB | 1904 |
| | | | | palindrome siNA | | |
| 82 | UAGCCAUGGCGUUAGUAUGAGUG | 1460 | 34131 | HCVb:100L15 (82C) 5′p | pUACUAACGCCAUGGC GUUAGUAB | 1905 |
| | | | | palindrome siNA | | |
| 126 | CCCUCCCGGGAGAGCCAUAGUGG | 1461 | 34132 | HCVb:144L19 (126C) | pACUAUGGCUCUCCCGGGAG AGCCAUAGUB | 1906 |
| | | | | 5′p palindrome siNA | | |
| 126 | CCCUCCCGGGAGAGCCAUAGUGG | 1461 | 34133 | HCVb:144L18 (126C) | pCUAUGGCUCUCCCGGGAG AGCCAUAGB | 1907 |
| | | | | 5′p palindrome siNA | | |
| 126 | CCCUCCCGGGAGAGCCAUAGUGG | 1461 | 34134 | HCVb:144L17 (126C) | pUAUGGCUCUCCCGGGAG AGCCAUAB | 1908 |
| | | | | 5′p palindrome siNA | | |
| 126 | CCCUCCCGGGAGAGCCAUAGUGG | 1461 | 34135 | HCVb:144L16 (126C) | pAUGGCUCUCCCGGGAG AGCCAUB | 1909 |
| | | | | 5′p palindrome siNA | | |
| 126 | CCCUCCCGGGAGAGCCAUAGUGG | 1461 | 34136 | HCVb:144L15 (126C) | pUGGCUCUCCCGGGAG AGCCAB | 1910 |
| | | | | 5′p palindrome siNA | | |
| 155 | GAACCGGUGAGUACACCGGAAUU | 1432 | 34137 | HCVb:171L17 (155C) | pCCGGUGUACUCACCGGU GAGUACACCGGB | 1911 |
| | | | | 5′p palindrome siNA | | |
| 155 | GAACCGGUGAGUACACCGGAAUU | 1432 | 34138 | HCVb:170L16 (155C) | pCGGUGUACUCACCGGU GAGUACACCGB | 1912 |
| | | | | 5′p palindrome siNA | | |
| 155 | GAACCGGUGAGUACACCGGAAUU | 1432 | 34139 | HCVb:169L15 (155C) | pGGUGUACUCACCGGU GAGUACACCB | 1913 |
| | | | | 5′p palindrome siNA | | |
| 315 | GCCCCGGGAGGUCUCGUAGACCG | 1416 | 34140 | HCVb:331L17 (315C) | pCUACGAGACCUCCCGGG AGGUCUCGUAGB | 1914 |
| | | | | 5′p palindrome siNA | | |
| 315 | GCCCCGGGAGGUCUCGUAGACCG | 1416 | 34141 | HCVb:330L16 (315C) | pUACGAGACCUCCCGGG AGGUCUCGUAB | 1915 |
| | | | | 5′p palindrome siNA | | |
| 315 | GCCCCGGGAGGUCUCGUAGACCG | 1416 | 34142 | HCVb:329L15 (315C) | pACGAGACCUCCCGGG AGGUCUCGUB | 1916 |
| | | | | 5′p palindrome siNA | | |
| 327 | CCCCGGGAGGUCUCGUAGACCGU | 1417 | 34494 | HCVa:345L21 antisense | GGucuAcGAGAccucccGGTT B | 1917 |
| | | | | siNA (327C) stab19 | | |
| 327 | CCCCGGGAGGUCUCGUAGACCGU | 1417 | 34495 | HCVa:345L21 antisense | GGcccuccAGAGcAucuGGTT B | 1918 |
| | | | | siNA (327C) inv | | |
| | | | | stab19 | | |
| 304 | GCCUGAUAGGGUGCUUGCGAGUG | 1444 | 34496 | HCVa:322L21 antisense | cucGcAAGcAcccuAucAGTT B | 1919 |
| | | | | (304C) stab19 | | |
| 304 | GCCUGAUAGGGUGCUUGCGAGUG | 1444 | 34499 | HCVa:322L21 antisense | GAcuAucccAcGAAcGcucTT B | 1920 |
| | | | | siNA (304C) inv | | |
| | | | | stab19 | | |
| 282 | UCGCGAAAGGCCUUGUGGUACUG | 1434 | 34581 | HCVa:282U21 sense | GCGAAAGGCCUUGUGGUACTT | 1921 |
| | | | | siNA stab00 | | |
| 283 | CGCGAAAGGCCUUGUGGUACUGC | 1435 | 34582 | HCVa:283U21 sense | CGAAAGGCCUUGUGGUACUTT | 1922 |
| | | | | siNA stab00 | | |
| 304 | GCCUGAUAGGGUGCUUGCGAGUG | 1444 | 34583 | HCVa:304U21 sense | CUGAUAGGGUGCUUGCGAGTT | 1923 |
| | | | | siNA stab00 | | |
| 307 | UGAUAGGGUGCUUGCGAGUGCCC | 1446 | 34584 | HCVa:307U21 sense | AUAGGGUGCUUGCGAGUGCTT | 1924 |
| | | | | siNA stab00 | | |
| 327 | CCCCGGGAGGUCUCGUAGACCGU | 1417 | 34585 | HCVa:327U21 sense | CCGGGAGGUCUCGUAGACCTT | 1925 |
| | | | | siNA stab00 | | |
| 282 | UCGCGAAAGGCCUUGUGGUACUG | 1434 | 34586 | HCVa:300L21 antisense | GUACCACAAGGCCUUUCGCTT | 1926 |
| | | | | siNA (282C) stab00 | | |
| 283 | CGCGAAAGGCCUUGUGGUACUGC | 1435 | 34587 | HCVa:301L21 antisense | AGUACCACAAGGCCUUUCGTT | 1927 |
| | | | | siNA (283C) stab00 | | |
| 304 | GCCUGAUAGGGUGCUUGCGAGUG | 1444 | 34588 | HCVa:322L21 antisense | CUCGCAAGCACCCUAUCAGTT | 1928 |
| | | | | siNA (304C) stab00 | | |
| 307 | UGAUAGGGUGCUUGCGAGUGCCC | 1446 | 34589 | HCVa:325L21 antisense | GCACUCGCAAGCACCCUAUTT | 1929 |
| | | | | siNA (307C) stab00 | | |
| 282 | UCGCGAAAGGCCUUGUGGUACUG | 1434 | 34590 | HCVa:282U21 sense | CAUGGUGUUCCGGAAAGCGTT | 1930 |
| | | | | siNA inv stab00 | | |
| 283 | CGCGAAAGGCCUUGUGGUACUGC | 1435 | 34591 | HCVa:283U21 sense | UCAUGGUGUUCCGGAAAGCTT | 1931 |
| | | | | siNA inv stab00 | | |
| 304 | GCCUGAUAGGGUGCUUGCGAGUG | 1444 | 34592 | HCVa:304U21 sense | GAGCGUUCGUGGGAUAGUCTT | 1932 |
| | | | | siNA inv stab00 | | |
| 307 | UGAUAGGGUGCUUGCGAGUGCCC | 1446 | 34593 | HCVa:307U21 sense | CGUGAGCGUUCGUGGGAUATT | 1933 |
| | | | | siNA inv stab00 | | |
| 327 | CCCCGGGAGGUCUCGUAGACCGU | 1417 | 34594 | HCVa:327U21 sense | CCAGAUGCUCUGGAGGGCCTT | 1934 |
| | | | | siNA inv stab00 | | |
| 282 | UCGCGAAAGGCCUUGUGGUACUG | 1434 | 34595 | HCVa:300L21 antisense | CGCUUUCCGGAACACCAUGTT | 1935 |
| | | | | siNA (282C) inv | | |
| | | | | stab00 | | |
| 283 | CGCGAAAGGCCUUGUGGUACUGC | 1435 | 34596 | HCVa:301L21 antisense | GCUUUCCGGAACACCAUGATT | 1936 |
| | | | | siNA (283C) inv | | |
| | | | | stab00 | | |
| 304 | GCCUGAUAGGGUGCUUGCGAGUG | 1444 | 34597 | HCVa:322L21 antisense | GACUAUCCCACGAACGCUCTT | 1937 |
| | | | | siNA (304C) inv stab00 | | |
| 307 | UGAUAGGGUGCUUGCGAGUGCCC | 1446 | 34598 | HCVa:325L21 antisense | UAUCCCACGAACGCUCACGTT | 1938 |
| | | | | siNA (307C) inv stab00 | | |
| 327 | CCCCGGGAGGUCUCGUAGACCGU | 1417 | 34599 | HCVa:345L21 antisense | GGCCCUCCAGAGCAUCUGGTT | 1939 |
| | | | | siNA (327C) inv stab00 | | |
| 327 | CCCCGGGAGGUCUCGUAGACCGU | 1417 | 35173 | HCVa:327U21 sense | B ccGGGAGGucucGUAGACCTT B | 1940 |
| | | | | siNA stab07 N1 | | |
| 327 | CCCCGGGAGGUCUCGUAGACCGU | 1417 | 35174 | HCVa:345L21 antisense | GGUCUAcGAGAccucccGGTsT | 1941 |
| | | | | siNA (327C) stab08 N1 | | |
| 327 | CCCCGGGAGGUCUCGUAGACCGU | 1417 | 35175 | HCVa:345L21 antisense | GGUcuAcGAGAccucccGGTsT | 1942 |
| | | | | siNA (327C) stab25 | | |
| 327 | CCCCGGGAGGUCUCGUAGACCGU | 1417 | 35176 | HCVa:345L21 antisense | GGucuAcGAGAccucccGGTsT | 1943 |
| | | | | siNA (327C) stab08 N3 | | |
| 327 | CCCCGGGAGGUCUCGUAGACCGU | 1417 | 35177 | HCVa:345L21 antisense | GGucuAcGAGAccucccGGTsT | 1944 |
| | | | | siNA (327C) stab24 | | |
| 304 | GCCUGAUAGGGUGCUUGCGAGUG | 1444 | 35178 | HCVa:304U21 sense | B cuGAuAGGGuGcuUGCGAGTT B | 1945 |
| | | | | siNA stab01 N1 | | |
| 304 | GCCUGAUAGGGUGCUUGCGAGUG | 1444 | 35179 | HCVa:322L21 antisense | CUCGCAAGcAcccuAucAGTsT | 1946 |
| | | | | siNA (304C) stab08 N1 | | |
| 304 | GCCUGAUAGGGUGCUUGCGAGUG | 1444 | 35180 | HCVa:322L21 antisense | CUCGcAAGcAcccuAucAGTsT | 1947 |
| | | | | siNA (304C) stab25 | | |
| 304 | GCCUGAUAGGGUGCUUGCGAGUG | 1444 | 35181 | HCVa:322L21 antisense | CUcGcAAGcAcccuAucAGTsT | 1948 |
| | | | | siNA (304C) stab08 N3 | | |
| 304 | GCCUGAUAGGGUGCUUGCGAGUG | 1444 | 35182 | HCVa:322L21 antisense | CucGcAAGcAcccuAucAGTsT | 1949 |
| | | | | siNA (304C) stab24 | | |
| 327 | CCCCGGGAGGUCUCGUAGACCGU | 1417 | 35225 | HCVa:327 siNA stab0/0 | GGUCUACGAGACCUCCCGG | 1950 |
| | | | | Pal01 | CCGGGAGGUCUCGUAGACC | |
| 327 | CCCCGGGAGGUCUCGUAGACCGU | 1417 | 35226 | HCVa:327 siNA stab0/0 | GGUCUACGAGACCUCCCGG | 1951 |
| | | | | Pal02 | CCGGGAGGUCUCGUAGACCTT | |
| 327 | CCCCGGGAGGUCUCGUAGACCGU | 1417 | 35227 | HCVa:327 siNA stab0/0 | GGUCUACGAGACCUCCCG | 1952 |
| | | | | Pal03 | CGGGAGGUCUCGUAGACC | |
| 327 | CCCCGGGAGGUCUCGUAGACCGU | 1417 | 35228 | HCVa:327 siNA stab0/0 | GGUCUACGAGACCUCCCG | 1953 |
| | | | | Pal04 | CGGGAGGUCUCGUAGACCTT | |
| 327 | CCCCGGGAGGUCUCGUAGACCGU | 1417 | 35229 | HCVa:327 siNA stab0/0 | GGUCUACGAGACCUCCC | 1954 |
| | | | | Pal05 | GGGAGGUCUCGUAGACC | |
| 327 | CCCCGGGAGGUCUCGUAGACCGU | 1417 | 35230 | HCVa:327 siNA stab0/0 | GGUCUACGAGACCUCCC | 1955 |
| | | | | Pal06 | GGGAGGUCUCGUAGACCTT | |
| 327 | CCCCGGGAGGUCUCGUAGACCGU | 1417 | 35231 | HCVa:327 siNA stab0/0 | GGUCUACGAGACCUCC | 1956 |
| | | | | Pal07 | GGAGGUCUCGUAGACC | |
| 327 | CCCCGGGAGGUCUCGUAGACCGU | 1417 | 35232 | HCVa:327 siNA stab0/0 | GGUCUACGAGACCUCC | 1957 |
| | | | | Pal08 | GGAGGUCUCGUAGACCTT | |
| 327 | CCCCGGGAGGUCUCGUAGACCGU | 1417 | 35235 | HCVa:327 siNA stab0/0 | GUCUACGAGACCUCCCGG | 1958 |
| | | | | Pal11 | GAGGUCUCGUAGAC | |
| 327 | CCCCGGGAGGUCUCGUAGACCGU | 1417 | 35236 | HCVa:327 siNA stab0/0 | GUCUACGAGACCUCCCGG | 1959 |
| | | | | Pal12 | GAGGUCUCGUAGACTT | |
| 327 | CCCCGGGAGGUCUCGUAGACCGU | 1417 | 35237 | HCVa:327 siNA stab0/0 | UCUACGAGACCUCCCGG GAGGUCUCGUAGA | 1960 |
| | | | | Pal13 | | |
| 327 | CCCCGGGAGGUCUCGUAGACCGU | 1417 | 35238 | HCVa:327 siNA stab0/0 | UCUACGAGACCUCCCGG | 1961 |
| | | | | Pal14 | GAGGUCUCGUAGATT | |
| 327 | CCCCGGGAGGUCUCGUAGACCGU | 1417 | 35239 | HCVa:327 siNA stab0/0 | CUACGAGACCUCCCGG GAGGUCUCGUAG | 1962 |
| | | | | Pal15 | | |
| 327 | CCCCGGGAGGUCUCGUAGACCGU | 1417 | 35240 | HCVa:327 siNA stab0/0 | CUACGAGACCUCCCGG GAGGUCUCGUAGTT | 1963 |
| | | | | Pal16 | | |
| 327 | CCCCGGGAGGUCUCGUAGACCGU | 1417 | 35241 | HCVa:327 siNA stab0/0 | GGUCUACGAGACCUCCAGG UCUCGUAGACC | 1964 |
| | | | | Pal17 | | |
| 327 | CCCCGGGAGGUCUCGUAGACCGU | 1417 | 35242 | HCVa:327 siNA stab0/0 | GGUCUACGAGACCUCCAGG | 1965 |
| | | | | Pal18 | UCUCGUAGACCTT | |
| 327 | CCCCGGGAGGUCUCGUAGACCGU | 1417 | 35243 | HCVa:327 siNA stab0/0 | GGUCUACGAGACCUCGAGG UCUCGUAGACC | 1966 |
| | | | | Pal19 | | |
| 327 | CCCCGGGAGGUCUCGUAGACCGU | 1417 | 35244 | HCVa:327 siNA stab0/0 | GGUCUACGAGACCUCGAGG | 1967 |
| | | | | Pal20 | UCUCGUAGACCTT | |
| 327 | CCCCGGGAGGUCUCGUAGACCGU | 1417 | 35245 | HCVa:327 siNA stab0/0 | GGUCUACGAGACCUGCAGG UCUCGUAGACC | 1968 |
| | | | | Pal21 | | |
| 327 | CCCCGGGAGGUCUCGUAGACCGU | 1417 | 35246 | HCVa:327 siNA stab0/0 | GGUCUACGAGACCUGCAGG | 1969 |
| | | | | Pal22 | UCUCGUAGACCTT | |
| 304 | GCCUGAUAGGGUGCUUGCGAGUG | 1444 | 35247 | HCVa:304 siNA stab0/0 | GACUAUCCCACGAACGCUC | 1970 |
| | | | | Pal01 | GAGCGUUCGUGGGAUAGUCTT | |
| 304 | GCCUGAUAGGGUGCUUGCGAGUG | 1444 | 35248 | HCVa:304 siNA stab0/0 | GACUAUCCCACGAACGCUC | 1971 |
| | | | | Pal02 | GAGCGUUCGUGGGAUAGUC | |
| 304 | GCCUGAUAGGGUGCUUGCGAGUG | 1444 | 35249 | HCVa:304 siNA stab0/0 | GACUAUCCCACGAACGCGU | 1972 |
| | | | | Pal03 | UCGUGGGAUAGUCTT | |
| 304 | GCCUGAUAGGGUGCUUGCGAGUG | 1444 | 35250 | HCVa:304 siNA stab0/0 | GACUAUCCCACGAACGCGU | 1973 |
| | | | | Pal04 | UCGUGGGAUAGUC | |
| 304 | GCCUGAUAGGGUGCUUGCGAGUG | 1444 | 35251 | HCVa:304 siNA stab0/0 | GACUAUCCCACGAACGUUC | 1974 |
| | | | | Pal05 | GUGGGAUAGUCTT | |
| 304 | GCCUGAUAGGGUGCUUGCGAGUG | 1444 | 35252 | HCVa:304 siNA stab0/0 | GACUAUCCCACGAACGUUC GUGGGAUAGUC | 1975 |
| | | | | Pal06 | | |
| 304 | GCCUGAUAGGGUGCUUGCGAGUG | 1444 | 35253 | HCVa:304 siNA stab0/0 | ACUAUCCCACGAACGUUC GUGGGAUAGUTT | 1976 |
| | | | | Pal07 | | |
| 304 | GCCUGAUAGGGUGCUUGCGAGUG | 1444 | 35254 | HCVa:304 siNA stab0/0 | ACUAUCCCACGAACGUUC GUGGGA | 1977 |
| | | | | Pal08 | | |
| 327 | CCCCGGGAGGUCUCGUAGACCGU | 1462 | 36414 | HCVa bf-L-21 siNA | CCGGGAGGUCUCGUAGACCTT L | 1978 |
| | UCGCGAAAGGCCUUGUGGUACUG | | | stab00 [HCVa:327U21 | GCGAAAGGCCUUGUGGUACTT | |
| | | | | sense o18S | | |
| | | | | HCVa:282U21 sense] | | |
| 327 | CCCCGGGAGGUCUCGUAGACCGU | 1463 | 36415 | HCVa bf-L-22 siNA | CCGGGAGGUCUCGUAGACCTT L | 1979 |
| | UGAUAGGGUGCUUGCGAGUGCCC | | | stab00 [HCVa:327U21 | AUAGGGUGCUUGCGAGUGCTT | |
| | | | | sense o18S | | |
| | | | | HCVa:307U21 sense] | | |
| 307 | UGAUAGGGUGCUUGCGAGUGCCC | 1464 | 36430 | HCVa bf-L-20 siNA | AUAGGGUGCUUGCGAGUGCTT L | 1980 |
| | UCGCGAAAGGCCUUGUGGUACUG | | | stab00 [HCVa:307U21 | GCGAAAGGCCUUGUGGUACTT | |
| | | | | sense o18S | | |
| | | | | HCVa:282U21 sense] | | |
| 307 | UGAUAGGGUGCUUGCGAGUGCCC | 1446 | 36438 | HCVa:307U21 sense | AUAGGGUGCUUGCGAGUGCTT | 1924 |
| | | | | siNA stab00 | | |
| 307 | UGAUAGGGUGCUUGCGAGUGCCC | 1446 | 36446 | HCVa:325L21 antisense | GCACUCGCAAGCACCCUAUTT | 1929 |
| | | | | siNA (307C) stab00 | | |
| 327 | CCCCGGGAGGUCUCGUAGACCGU | 1417 | 36447 | HCVa:345L21 antisense | GGUCUACGAGACCUCCCGGTT | 1732 |
| | | | | siNA (327C) stab00 | | |
| 304 | GCCUGAUAGGGUGCUUGCGAGUG | 1444 | 36727 | HCVa:304U21 sense | B CUGAUAGGGUGCUUGCGAGTT B | 1981 |
| | | | | siNA stab09 | | |
| 304 | GCCUGAUAGGGUGCUUGCGAGUG | 1444 | 36728 | HCVa:322L21 antisense | CUCGCAAGCACCCUAUCAGTsT | 1982 |
| | | | | siNA (304C) stab10 | | |
| 304 | GCCUGAUAGGGUGCUUGCGAGUG | 1444 | 37010 | HCVa:304U21 sense | B cuGAuAGGGuGcuuGcGAGTT B | 1983 |
| | | | | siNA stab04 | | |
| 304 | GCCUGAUAGGGUGCUUGCGAGUG | 1444 | 37011 | HCVa:322L21 antisense | cucGcAAGcAcccuAucAGTsT | 1984 |
| | | | | siNA (304C) stab05 | | |
| 307 | CCCCGGGAGGUCUCGUAGACCGU | 1463 | 37781 | HCVa bf-L-22 siNA | B ccGGGAGGucucGuAGAccTT L | 1985 |
| | UGAUAGGGUGCUUGCGAGUGCCC | | | stab07 [HCVa:327U21 | AuAGGGuGcuuGcGAGuGcTT B | |
| | | | | sense o18S | | |
| | | | | HCVa:307U21 sense] | | |
| 307 | UGAUAGGGUGCUUGCGAGUGCCC | 1446 | 37790 | HCVa:325L21 antisense | GCAcucGcAAGcAcccuAuTT | 1986 |
| | | | | siNA (307C) stab26 | | |
| 327 | CCCCGGGAGGUCUCGUAGACCGU | 1417 | 37791 | HCVa:345L21 antisense | GGUcuAcGAGAccucccGGTT | 1987 |
| | | | | siNA (327C) stab26 | | |
| 282 | UCGCGAAAGGCCUUGUGGUACUG | 1434 | 38279 | HCVa:300L21 antisense | GUAccAcAAGGccuuucGcTsT | 1988 |
| | | | | siNA (282C) stab25 | | |
| 283 | CGCGAAAGGCCUUGUGGUACUGC | 1435 | 38280 | HCVa:301L21 antisense | AGUAccAcAAGGccuuucGTsT | 1989 |
| | | | | siNA (283C) stab25 | | |
| 307 | UGAUAGGGUGCUUGCGAGUGCCC | 1446 | 38281 | HCVa:325L21 antisense | GCAcucGcAAGcAcccuAuTsT | 1990 |
| | | | | siNA (307C) stab25 | | |
| 304 | GCCUGAUAGGGUGCUUGCGAGUG | 1444 | 38283 | HCVa:322L21 antisense | CUCGcAAGcAcccuAucAGTT | 1991 |
| | | | | siNA (304C) stab26 | | |
| 304 | GCCUGAUAGGGUGCUUGCGAGUG | 1444 | 38284 | HCVa:322L21 antisense | CUCGcAAGcAcccuAucAGTTB | 1992 |
| | | | | siNA (304C) stab27 | | |
| 282 | UCGCGAAAGGCCUUGUGGUACUG | 1434 | 38293 | HCVa:300L21 antisense | GuAccAcAAGGccuuucGcTT B | 1993 |
| | | | | siNA (282C) stab19 | | |
| 282 | UCGCGAAAGGCCUUGUGGUACUG | 1434 | 38294 | HCVa:300L21 antisense | GUAccAcAAGGccuuucGcTT | 1994 |
| | | | | siNA (282C) stab26 | | |
| 282 | UCGCGAAAGGCCUUGUGGUACUG | 1434 | 38295 | HCVa:300L21 antisense | GUAccAcAAGGccuuucGcTT B | 1995 |
| | | | | siNA (282C) stab27 | | |
| 282 | UCGCGAAAGGCCUUGUGGUACUG | 1434 | 38296 | HCVa:300L21 antisense | GuAccAcAAGGccuuucGcTsT | 1996 |
| | | | | siNA (282C) stab29 | | |
| 282 | UCGCGAAAGGCCUUGUGGUACUG | 1434 | 38297 | HCVa:300L21 antisense | GuAccAcAAGGccuuucGcTT | 1997 |
| | | | | siNA (282C) stab30 | | |
| 282 | UCGCGAAAGGCCUUGUGGUACUG | 1434 | 38298 | HCVa:300L21 antisense | GuAccAcAAGGccuuucGcTT B | 1998 |
| | | | | siNA (282C) stab31 | | |
| 282 | UCGCGAAAGGCCUUGUGGUACUG | 1434 | 38299 | HCVa:300L21 antisense | GuAccAcAAGGccuuucGcTT | 1999 |
| | | | | siNA (282C) stab32 | | |
| 304 | GCCUGAUAGGGUGCUUGCGAGUG | 1444 | 38300 | HCVa:322L21 antisense | cucGcAAGcAcccuAucAGTT | 2000 |
| | | | | siNA (304C) stab32 | | |
| 327 | CCCCGGGAGGUCUCGUAGACCGU | 1417 | 38301 | HCVa:345L21 antisense | GGUcuAcGAGAccucccGGTT B | 2001 |
| | | | | siNA (327C) stab21 | | |
| 327 | CCCCGGGAGGUCUCGUAGACCGU | 1417 | 38302 | HCVa:345L21 antisense | GGucuAcGAGAccucccGGTT | 2002 |
| | | | | siNA (327C) stab30 | | |
| 327 | CCCCGGGAGGUCUCGUAGACCGU | 1417 | 38303 | HCVa:345L21 antisense | GGucuAcGAGAccucccGGTT B | 2003 |
| | | | | siNA (327C) stab31 | | |
| 327 | CCCCGGGAGGUCUCGUAGACCGU | 1417 | 38304 | HCVa:345L21 antisense | GGucuAcGAGAccucccGGTT | 2004 |
| | | | | siNA (327C) stab32 | | |
| 304 | CCCCGGGAGGUCUCGUAGACCGU | 1465 | 38310 | HCV bf-L-23 siNA | CCGGGAGGUCUCGUAGACCTT L | 2005 |
| | GCCUGAUAGGGUGCUUGCGAGUG | | | stab00 [HCV:327U21 | CUGAUAGGGUGCUUGCGAGTT | |
| | | | | sense o18S | | |
| | | | | HCV:304U21 sense] | | |
| 282 | GCCUGAUAGGGUGCUUGCGAGUG | 1466 | 38311 | HCV bf-L-24 siNA | CUGAUAGGGUGCUUGCGAGTT L | 2006 |
| | UCGCGAAAGGCCUUGUGGUACUG | | | stab00 [HCV:304U21 | GCGAAAGGCCUUGUGGUACTT | |
| | | | | sense o18S | | |
| | | | | HCV:282U21 sense] | | |
| 304 | CCCCGGGAGGUCUCGUAGACCGU | 1465 | 38312 | HCV bf-L-23 siNA | B ccGGGAGGucucGuAGAccTT L | 2007 |
| | GCCUGAUAGGGUGCUUGCGAGUG | | | stab07 [HCV:327U21 | cuGAuAGGGuGcuuGcGAGTT B | |
| | | | | sense o18S | | |
| | | | | HCV:304U21 sense] | | |
| 282 | CCCCGGGAGGUCUCGUAGACCGU | 1462 | 38313 | HCV bf-L-21 siNA | B ccGGGAGGucucGuAGAccTT L | 2008 |
| | UCGCGAAAGGCCUUGUGGUACUG | | | stab07 [HCVa:327U21 | GcGAAAGGccuuGuGGuAcTT B | |
| | | | | sense o18S | | |
| | | | | HCVa:282U21 sense] | | |
| 282 | GCCUGAUAGGGUGCUUGCGAGUG | 1466 | 38314 | HCV bf-L-24 siNA | B cuGAuAGGGuGcuuGcGAGTT L | 2009 |
| | UCGCGAAAGGCCUUGUGGUACUG | | | stab07 [HCV:304U21 | GcGAAAGGccuuGuGGuAcTT B | |
| | | | | sense o18S | | |
| | | | | HCV:282U21 sense] | | |

Uppercase = ribonucleotide
u,c = 2′-deoxy-2′-fluoro U,C
T = thymidine
B = inverted deoxy abasic
s = phosphorothioate linkage
A = deoxy Adenosine
G = deoxy Guanosine
G = 2′-O-methyl Guanosine
A = 2′-O-methyl Adenosine
L = hegS = hexethelyne glycol spacer; spacer-18 (Glen Research 10-1918-xx)
p = terminal phosphate

[0538] TABLE IV
Non-limiting examples of Stabilization Chemistries
for chemically modified siNA constructs

| Chemistry | pyrimidine | Purine | cap | p = S | Strand |
|---|---|---|---|---|---|
| “Stab 00” | Ribo | Ribo | TT at 3′- | | S/AS |
| | | | ends | | |
| “Stab 1” | Ribo | Ribo | — | 5 at 5′-end | S/AS |
| | | | | 1 at 3′-end | |
| “Stab 2” | Ribo | Ribo | — | All linkages | Usually |
| | | | | | AS |
| “Stab 3” | 2′-fluoro | Ribo | — | 4 at 5′-end | Usually |
| | | | | 4 at 3′-end | S |
| “Stab 4” | 2′-fluoro | Ribo | 5′ and 3′- | — | Usually |
| | | | ends | | S |
| “Stab 5” | 2′-fluoro | Ribo | — | 1 at 3′-end | Usually |
| | | | | | AS |
| “Stab 6” | 2′-O-Methyl | Ribo | 5′ and 3′- | — | Usually |
| | | | ends | | S |
| “Stab 7” | 2′-fluoro | 2′-deoxy | 5′ and 3′- | — | Usually |
| | | | ends | | S |
| “Stab 8” | 2′-fluoro | 2′-O- | — | 1 at 3′-end | S/AS |
| | | Methyl | | | |
| “Stab 9” | Ribo | Ribo | 5′ and 3′- | — | Usually |
| | | | ends | | S |
| “Stab 10” | Ribo | Ribo | — | 1 at 3′-end | Usually |
| | | | | | AS |
| “Stab 11” | 2′-fluoro | 2′-deoxy | — | 1 at 3′-end | Usually |
| | | | | | AS |
| “Stab 12” | 2′-fluoro | LNA | 5′ and 3′- | | Usually |
| | | | ends | | S |
| “Stab 13” | 2′-fluoro | LNA | | 1 at 3′-end | Usually |
| | | | | | AS |
| “Stab 14” | 2′-fluoro | 2′-deoxy | | 2 at 5′-end | Usually |
| | | | | 1 at 3′-end | AS |
| “Stab 15” | 2′-deoxy | 2′-deoxy | | 2 at 5′-end | |
| | | | | 1 at 3′-end | AS |
| “Stab 16” | Ribo | 2′-O- | 5′ and 3′- | | Usually |
| | | Methyl | ends | | S |
| “Stab 17” | 2′-O-Methyl | 2′-O- | 5′ and 3′- | | Usually |
| | | Methyl | ends | | S |
| “Stab 18” | 2′-fluoro | 2′-O- | 5′ and 3′- | | Usually |
| | | Methyl | ends | | S |
| “Stab 19” | 2′-fluoro | 2′-O- | 3′-end | | S/AS |
| | | Methyl | | | |
| “Stab 20” | 2′-fluoro | 2′-deoxy | 3′-end | | Usually |
| | | | | | AS |
| “Stab 21” | 2′-fluoro | Ribo | 3′-end | | Usually |
| | | | | | AS |
| “Stab 22” | Ribo | Ribo | 3′-end | | Usually |
| | | | | | AS |
| “Stab 23” | 2′-fluoro* | 2′-deoxy* | 5′ and 3′- | | Usually |
| | | | ends | | S |
| “Stab 24” | 2′-fluoro* | 2′-O- | — | 1 at 3′-end | S/AS |
| | | Methyl* | | | |
| “Stab 25” | 2′-fluoro* | 2′-O- | — | 1 at 3′-end | S/AS |
| | | Methyl* | | | |
| “Stab 26” | 2′-fluoro* | 2′-O- | — | | S/AS |
| | | Methyl* | | | |
| “Stab 27” | 2′-fluoro* | 2′-O- | 3′-end | | S/AS |
| | | Methyl* | | | |
| “Stab 28” | 2′-fluoro* | 2′-O- | 3′-end | | S/AS |
| | | Methyl* | | | |
| “Stab 29” | 2′-fluoro* | 2′-O- | | 1 at 3′-end | S/AS |
| | | Methyl* | | | |
| “Stab 30” | 2′-fluoro* | 2′-O- | | | S/AS |
| | | Methyl* | | | |
| “Stab 31” | 2′-fluoro* | 2′-O- | 3′-end | | S/AS |
| | | Methyl* | | | |
| “Stab 32” | 2′-fluoro | 2′-O- | | | S/AS |
| | | Methyl | | | |

CAP = any terminal cap, see for example FIG. 10.
All Stab 00-32 chemistries can comprise 3′-terminal thymidine (TT) residues
All Stab 00-32 chemistries typically comprise about 21 nucleotides, but can vary as described herein.
S = sense strand
AS = antisense strand
*Stab 23 has a single ribonucleotide adjacent to 3′-CAP
*Stab 24 and Stab 28 have a single ribonucleotide at 5′-terminus
*Stab 25, Stab 26, and Stab 27 have three ribonucleotides at 5′-terminus
*Stab 29, Stab 30, and Stab 31, any purine at first three nucleotide positions from 5′-terminus are ribonucleotides
p = phosphorothioate linkage

[0539] TABLE V

| | | | | | |
|---|---|---|---|---|---|
| | | | | Wait Time* | |
| Reagent | Equivalents | Amount | Wait Time* DNA | 2′-O-methyl | Wait Time* RNA |

A. 2.5 μmol Synthesis Cycle ABI 394 Instrument

| | | | | | | | | | |
|---|---|---|---|---|---|---|---|---|---|
| Phosphoramidites | 6.5 | 163 | μL | 45 | sec | 2.5 | min | 7.5 | min |
| S-Ethyl Tetrazole | 23.8 | 238 | μL | 45 | sec | 2.5 | min | 7.5 | min |
| Acetic Anhydride | 100 | 233 | μL | 5 | sec | 5 | sec | 5 | sec |
| N-Methyl | 186 | 233 | μL | 5 | sec | 5 | sec | 5 | sec |
| Imidazole | | | | | | | | | |
| TCA | 176 | 2.3 | mL | 21 | sec | 21 | sec | 21 | sec |
| Iodine | 11.2 | 1.7 | mL | 45 | sec | 45 | sec | 45 | sec |
| Beaucage | 12.9 | 645 | μL | 100 | sec | 300 | sec | 300 | sec |

| | | | | | | |
|---|---|---|---|---|---|---|
| Acetonitrile | NA | 6.67 | mL | NA | NA | NA |

B. 0.2 μmol Synthesis Cycle ABI 394 Instrument

| | | | | | | | | | |
|---|---|---|---|---|---|---|---|---|---|
| Phosphoramidites | 15 | 31 | μL | 45 | sec | 233 | sec | 465 | sec |
| S-Ethyl Tetrazole | 38.7 | 31 | μL | 45 | sec | 233 | min | 465 | sec |
| Acetic Anhydride | 655 | 124 | μL | 5 | sec | 5 | sec | 5 | sec |
| N-Methyl | 1245 | 124 | μL | 5 | sec | 5 | sec | 5 | sec |
| Imidazole | | | | | | | | | |
| TCA | 700 | 732 | μL | 10 | sec | 10 | sec | 10 | sec |
| Iodine | 20.6 | 244 | μL | 15 | sec | 15 | sec | 15 | sec |
| Beaucage | 7.7 | 232 | μL | 100 | sec | 300 | sec | 300 | sec |

| | | | | | | |
|---|---|---|---|---|---|---|
| Acetonitrile | NA | 2.64 | mL | NA | NA | NA |

C. 0.2 μmol Synthesis Cycle 96 well Instrument

| | Equivalents: | | | | | | | | |
|---|---|---|---|---|---|---|---|---|---|
| | DNA/2′-O- | Amount: DNA/ | | Wait Time* | | Wait Time* | | Wait Time* | |
| Reagent | methyl/Ribo | 2′-O-methyl/Ribo | | DNA | | 2′-O-methyl | | Ribo | |
| Phosphoramidites | 22/33/66 | 40/60/120 | μL | 60 | sec | 180 | sec | 360 | sec |
| S-Ethyl Tetrazole | 70/105/210 | 40/60/120 | μL | 60 | sec | 180 | min | 360 | sec |
| Acetic Anhydride | 265/265/265 | 50/50/50 | μL | 10 | sec | 10 | sec | 10 | sec |
| N-Methyl | 502/502/502 | 50/50/50 | μL | 10 | sec | 10 | sec | 10 | sec |
| Imidazole | | | | | | | | | |
| TCA | 238/475/475 | 250/500/500 | μL | 15 | sec | 15 | sec | 15 | sec |
| Iodine | 6.8/6.8/6.8 | 80/80/80 | μL | 30 | sec | 30 | sec | 30 | sec |
| Beaucage | 34/51/51 | 80/120/120 | | 100 | sec | 200 | sec | 200 | sec |

| | | | | | | |
|---|---|---|---|---|---|---|
| Acetonitrile | NA | 1150/1150/1150 | μL | NA | NA | NA |

Wait time does not include contact time during delivery.
Tandem synthesis utilizes double coupling of linker molecule

1. A multifunctional siNA molecule comprising a structure having Formula MF-III:
X X′
Y′-W-Y
wherein
(a) each X, X′, Y, and Y′ is independently an oligonucleotide of length about 15 nucleotides to about 50 nucleotides;
(b) X comprises nucleotide sequence that is complementary to nucleotide sequence present in region Y′;
(c) X′ comprises nucleotide sequence that is complementary to nucleotide sequence present in region Y;
(d) each X and X′ is independently of length sufficient to stably interact with a first and a second HCV target nucleic acid sequence, respectively, or a portion thereof;
(e) W represents a nucleotide or non-nucleotide linker that connects sequences Y′ and Y; and
(f) said multifunctional siNA directs cleavage of the first and second HCV target sequence via RNA interference.

2. The multifunctional siNA molecule of claim 1, wherein W connects the 3′-end of sequence Y′ with the 3′-end of sequence Y.

3. The multifunctional siNA molecule of claim 1, wherein W connects the 3′-end of sequence Y′ with the 5′-end of sequence Y.

4. The multifunctional siNA molecule of claim 1, wherein W connects the 5′-end of sequence Y′ with the 5′-end of sequence Y.

5. The multifunctional siNA molecule of claim 1, wherein W connects the 5′-end of sequence Y′ with the 3′-end of sequence Y.

6. The multifunctional siNA molecule of claim 1, wherein a terminal phosphate group is present at the 5′-end of any of sequence X, X′, Y, or Y′.

7. The multifunctional siNA molecule of claim 1, wherein W connects sequences Y and Y′ via a biodegradable linker.

8. The multifunctional siNA molecule of claim 1, wherein W further comprises a conjugate, label, aptamer, ligand, lipid, or polymer.

9. The multifunctional siNA molecule of claim 1, wherein any of sequence X, X′, Y, or Y′ comprises a 3′-terminal cap moiety.

10. The multifunctional siNA molecule of claim 9, wherein said terminal cap moiety is an inverted deoxyabasic moiety.

11. The multifunctional siNA molecule of claim 10, wherein said terminal cap moiety is an inverted deoxynucleotide moiety.

12. The multifunctional siNA molecule of claim 10, wherein said terminal cap moiety is a dinucleotide moiety.

13. The multifunctional siNA molecule of claim 12, wherein said dinucleotide is dithymidine (TT).

14. The multifunctional siNA molecule of claim 1, wherein said siNA molecule comprises no ribonucleotides.

15. The multifunctional siNA molecule of claim 1, wherein said siNA molecule comprises one or more ribonucleotides.

16. The multifunctional siNA molecule of claim 1, wherein any purine nucleotide in said siNA is a 2′-O-methyl purine nucleotide.

17. The multifunctional siNA molecule of claim 1, wherein any purine nucleotide in said siNA is a 2′-deoxy purine nucleotide.

18. The multifunctional siNA molecule of claim 1, wherein any pyrimidine nucleotide in said siNA is a 2′-deoxy-2′-fluoro pyrimidine nucleotide.

19. The multifunctional siNA molecule of claim 1, wherein each X, X′, Y, and Y′ independently comprises about 19 to about 23 nucleotides.

20. The multifunctional siNA molecule of claim 1, wherein said first and second HCV target sequence each is a HCV RNA sequence.

21. The multifunctional siNA molecule of claim 1, wherein said first HCV target sequence is a HCV RNA sequence, and said second HCV target sequence is a cellular target RNA sequence that is required for HCV infection or replication.

22. The multifunctional siNA molecule of claim 1, wherein said first HCV target sequence is a cellular target RNA sequence that is required for HCV infection or replication, and said second HCV target sequence is a HCV RNA sequence.

23. The multifunctional siNA molecule of claim 1, wherein said first and second HCV target sequences are each a cellular target RNA sequence that is required for HCV infection or replication.

24. The multifunctional siNA molecule of claim 21 or claim 22, wherein said cellular target RNA sequence is selected from a La antigen, FAS, FAS ligand, interferon regulatory factor, cellular PKR protein, elF2Bgamma, elF2gamma, human DEAD Box protein (DDX3), and polypyrimidine tract-binding protein.

25. A pharmaceutical composition comprising the multifunctional siNA molecule of claim 1 and an acceptable carrier or diluent.

The application's sequence listing, which the Patent Office published only in electronic form, follows.

SEQUENCE LISTING (2031 sequences)

SEQ ID NO: 1 - RNA, 19 nt, Artificial Sequence
  Description of Artificial Sequence: siNA target
gccccgggaggucucguag

SEQ ID NO: 2 - RNA, 19 nt, Artificial Sequence
  Description of Artificial Sequence: siNA target
ugugguacugccugauagg

SEQ ID NO: 3 - RNA, 19 nt, Artificial Sequence
  Description of Artificial Sequence: siNA target
uugugguacugccugauag

SEQ ID NO: 4 - RNA, 19 nt, Artificial Sequence
  Description of Artificial Sequence: siNA target
ccccgggaggucucguaga

SEQ ID NO: 5 - RNA, 19 nt, Artificial Sequence
  Description of Artificial Sequence: siNA target
gugguacugccugauaggg

SEQ ID NO: 6 - RNA, 19 nt, Artificial Sequence
  Description of Artificial Sequence: siNA target
cugccugauagggugcuug

SEQ ID NO: 7 - RNA, 19 nt, Artificial Sequence
  Description of Artificial Sequence: siNA target
ccuugugguacugccugau

SEQ ID NO: 8 - RNA, 19 nt, Artificial Sequence
  Description of Artificial Sequence: siNA target
gcgaaaggccuugugguac

SEQ ID NO: 9 - RNA, 19 nt, Artificial Sequence
  Description of Artificial Sequence: siNA target
uacugccugauagggugcu

SEQ ID NO: 10 - RNA, 19 nt, Artificial Sequence
  Description of Artificial Sequence: siNA target
gguacugccugauagggug

SEQ ID NO: 11 - RNA, 19 nt, Artificial Sequence
  Description of Artificial Sequence: siNA target
aaaggccuugugguacugc

SEQ ID NO: 12 - RNA, 19 nt, Artificial Sequence
  Description of Artificial Sequence: siNA target
aaggccuugugguacugcc

SEQ ID NO: 13 - RNA, 19 nt, Artificial Sequence
  Description of Artificial Sequence: siNA target
cuugugguacugccugaua

SEQ ID NO: 14 - RNA, 19 nt, Artificial Sequence
  Description of Artificial Sequence: siNA target
aggccuugugguacugccu

SEQ ID NO: 15 - RNA, 19 nt, Artificial Sequence
  Description of Artificial Sequence: siNA target
guacugccugauagggugc

SEQ ID NO: 16 - RNA, 19 nt, Artificial Sequence
  Description of Artificial Sequence: siNA target
acugccugauagggugcuu

SEQ ID NO: 17 - RNA, 19 nt, Artificial Sequence
  Description of Artificial Sequence: siNA target
cuugcgagugccccgggag

SEQ ID NO: 18 - RNA, 19 nt, Artificial Sequence
  Description of Artificial Sequence: siNA target
cugauagggugcuugcgag

SEQ ID NO: 19 - RNA, 19 nt, Artificial Sequence
  Description of Artificial Sequence: siNA target
uugcgagugccccgggagg

SEQ ID NO: 20 - RNA, 19 nt, Artificial Sequence
  Description of Artificial Sequence: siNA target
ccugauagggugcuugcga

SEQ ID NO: 21 - RNA, 19 nt, Artificial Sequence
  Description of Artificial Sequence: siNA target
ggccuugugguacugccug

SEQ ID NO: 22 - RNA, 19 nt, Artificial Sequence
  Description of Artificial Sequence: siNA target
gcuugcgagugccccggga

SEQ ID NO: 23 - RNA, 19 nt, Artificial Sequence
  Description of Artificial Sequence: siNA target
ugccugauagggugcuugc

SEQ ID NO: 24 - RNA, 19 nt, Artificial Sequence
  Description of Artificial Sequence: siNA target
gaaaggccuugugguacug

SEQ ID NO: 25 - RNA, 19 nt, Artificial Sequence
  Description of Artificial Sequence: siNA target
gccugauagggugcuugcg

SEQ ID NO: 26 - RNA, 19 nt, Artificial Sequence
  Description of Artificial Sequence: siNA target
cgaaaggccuugugguacu

SEQ ID NO: 27 - RNA, 19 nt, Artificial Sequence
  Description of Artificial Sequence: siNA target
gccuugugguacugccuga

SEQ ID NO: 28 - RNA, 19 nt, Artificial Sequence
  Description of Artificial Sequence: siNA target
gagugccccgggaggucuc

SEQ ID NO: 29 - RNA, 19 nt, Artificial Sequence
  Description of Artificial Sequence: siNA target
cccgggaggucucguagac

SEQ ID NO: 30 - RNA, 19 nt, Artificial Sequence
  Description of Artificial Sequence: siNA target
ugcgagugccccgggaggu

SEQ ID NO: 31 - RNA, 19 nt, Artificial Sequence
  Description of Artificial Sequence: siNA target
ugguacugccugauagggu

SEQ ID NO: 32 - RNA, 19 nt, Artificial Sequence
  Description of Artificial Sequence: siNA target
ccggugaguacaccggaau

SEQ ID NO: 33 - RNA, 19 nt, Artificial Sequence
  Description of Artificial Sequence: siNA target
gcgagugccccgggagguc

SEQ ID NO: 34 - RNA, 19 nt, Artificial Sequence
  Description of Artificial Sequence: siNA target
cgagugccccgggaggucu

SEQ ID NO: 35 - RNA, 19 nt, Artificial Sequence
  Description of Artificial Sequence: siNA target
ugccccgggaggucucgua

SEQ ID NO: 36 - RNA, 19 nt, Artificial Sequence
  Description of Artificial Sequence: siNA target
gugccccgggaggucucgu

SEQ ID NO: 37 - RNA, 19 nt, Artificial Sequence
  Description of Artificial Sequence: siNA target
agugccccgggaggucucg

SEQ ID NO: 38 - RNA, 19 nt, Artificial Sequence
  Description of Artificial Sequence: siNA target
ccgggaggucucguagacc

SEQ ID NO: 39 - RNA, 19 nt, Artificial Sequence
  Description of Artificial Sequence: siNA target
ugauagggugcuugcgagu

SEQ ID NO: 40 - RNA, 19 nt, Artificial Sequence
  Description of Artificial Sequence: siNA target
gugcuugcgagugccccgg

SEQ ID NO: 41 - RNA, 19 nt, Artificial Sequence
  Description of Artificial Sequence: siNA target
auagggugcuugcgagugc

SEQ ID NO: 42 - RNA, 19 nt, Artificial Sequence
  Description of Artificial Sequence: siNA target
gggugcuugcgagugcccc

SEQ ID NO: 43 - RNA, 19 nt, Artificial Sequence
  Description of Artificial Sequence: siNA target
cgggaggucucguagaccg

SEQ ID NO: 44 - RNA, 19 nt, Artificial Sequence
  Description of Artificial Sequence: siNA target
gggaggucucguagaccgu

SEQ ID NO: 45 - RNA, 19 nt, Artificial Sequence
  Description of Artificial Sequence: siNA target
gauagggugcuugcgagug

SEQ ID NO: 46 - RNA, 19 nt, Artificial Sequence
  Description of Artificial Sequence: siNA target
ggaggucucguagaccgug

SEQ ID NO: 47 - RNA, 19 nt, Artificial Sequence
  Description of Artificial Sequence: siNA target
agggugcuugcgagugccc

SEQ ID NO: 48 - RNA, 19 nt, Artificial Sequence
  Description of Artificial Sequence: siNA target
ugcuugcgagugccccggg

SEQ ID NO: 49 - RNA, 19 nt, Artificial Sequence
  Description of Artificial Sequence: siNA target
ggugcuugcgagugccccg

SEQ ID NO: 50 - RNA, 19 nt, Artificial Sequence
  Description of Artificial Sequence: siNA target
uagggugcuugcgagugcc

SEQ ID NO: 51 - RNA, 19 nt, Artificial Sequence
  Description of Artificial Sequence: siNA target
aggucucguagaccgugca

SEQ ID NO: 52 - RNA, 19 nt, Artificial Sequence
  Description of Artificial Sequence: siNA target
gaggucucguagaccgugc

SEQ ID NO: 53 - RNA, 19 nt, Artificial Sequence
  Description of Artificial Sequence: siNA target
ggaaccggugaguacaccg

SEQ ID NO: 54 - RNA, 19 nt, Artificial Sequence
  Description of Artificial Sequence: siNA target
cggaaccggugaguacacc

SEQ ID NO: 55 - RNA, 19 nt, Artificial Sequence
  Description of Artificial Sequence: siNA target
cggugaguacaccggaauu

SEQ ID NO: 56 - RNA, 19 nt, Artificial Sequence
  Description of Artificial Sequence: siNA target
gcggaaccggugaguacac

SEQ ID NO: 57 - RNA, 19 nt, Artificial Sequence
  Description of Artificial Sequence: siNA target
aaccggugaguacaccgga

SEQ ID NO: 58 - RNA, 19 nt, Artificial Sequence
  Description of Artificial Sequence: siNA target
accggugaguacaccggaa

SEQ ID NO: 59 - RNA, 19 nt, Artificial Sequence
  Description of Artificial Sequence: siNA target
cugcggaaccggugaguac

SEQ ID NO: 60 - RNA, 19 nt, Artificial Sequence
  Description of Artificial Sequence: siNA target
gucugcggaaccggugagu

SEQ ID NO: 61 - RNA, 19 nt, Artificial Sequence
  Description of Artificial Sequence: siNA target
gaaccggugaguacaccgg

SEQ ID NO: 62 - RNA, 19 nt, Artificial Sequence
  Description of Artificial Sequence: siNA target
ugcggaaccggugaguaca

SEQ ID NO: 63 - RNA, 19 nt, Artificial Sequence
  Description of Artificial Sequence: siNA target
ucugcggaaccggugagua

SEQ ID NO: 64 - RNA, 19 nt, Artificial Sequence
  Description of Artificial Sequence: siNA target
gggagagccauaguggucu

SEQ ID NO: 65 - RNA, 19 nt, Artificial Sequence
  Description of Artificial Sequence: siNA target
guggucugcggaaccggug

SEQ ID NO: 66 - RNA, 19 nt, Artificial Sequence
  Description of Artificial Sequence: siNA target
ggucugcggaaccggugag

SEQ ID NO: 67 - RNA, 19 nt, Artificial Sequence
  Description of Artificial Sequence: siNA target
cgggagagccauagugguc

SEQ ID NO: 68 - RNA, 19 nt, Artificial Sequence
  Description of Artificial Sequence: siNA target
ccgggagagccauaguggu

SEQ ID NO: 69 - RNA, 19 nt, Artificial Sequence
  Description of Artificial Sequence: siNA target
uggucugcggaaccgguga

SEQ ID NO: 70 - RNA, 19 nt, Artificial Sequence
  Description of Artificial Sequence: siNA target
gugaguacaccggaauugc

SEQ ID NO: 71 - RNA, 19 nt, Artificial Sequence
  Description of Artificial Sequence: siNA target
ugaguacaccggaauugcc

SEQ ID NO: 72 - RNA, 19 nt, Artificial Sequence
  Description of Artificial Sequence: siNA target
ggugaguacaccggaauug

SEQ ID NO: 73 - RNA, 19 nt, Artificial Sequence
  Description of Artificial Sequence: siNA target
gagccauaguggucugcgg

SEQ ID NO: 74 - RNA, 19 nt, Artificial Sequence
  Description of Artificial Sequence: siNA target
agagccauaguggucugcg

SEQ ID NO: 75 - RNA, 19 nt, Artificial Sequence
  Description of Artificial Sequence: siNA target
uaguggucugcggaaccgg

SEQ ID NO: 76 - RNA, 19 nt, Artificial Sequence
  Description of Artificial Sequence: siNA target
auaguggucugcggaaccg

SEQ ID NO: 77 - RNA, 19 nt, Artificial Sequence
  Description of Artificial Sequence: siNA target
gagagccauaguggucugc

SEQ ID NO: 78 - RNA, 19 nt, Artificial Sequence
  Description of Artificial Sequence: siNA target
gccauaguggucugcggaa

SEQ ID NO: 79 - RNA, 19 nt, Artificial Sequence
  Description of Artificial Sequence: siNA target
aguggucugcggaaccggu

SEQ ID NO: 80 - RNA, 19 nt, Artificial Sequence
  Description of Artificial Sequence: siNA target
cauaguggucugcggaacc

SEQ ID NO: 81 - RNA, 19 nt, Artificial Sequence
  Description of Artificial Sequence: siNA target
agccauaguggucugcgga

SEQ ID NO: 82 - RNA, 19 nt, Artificial Sequence
  Description of Artificial Sequence: siNA target
ccauaguggucugcggaac

SEQ ID NO: 83 - RNA, 19 nt, Artificial Sequence
  Description of Artificial Sequence: siNA target
ccccucccgggagagccau

SEQ ID NO: 84 - RNA, 19 nt, Artificial Sequence
  Description of Artificial Sequence: siNA target
ggagagccauaguggucug

SEQ ID NO: 85 - RNA, 19 nt, Artificial Sequence
  Description of Artificial Sequence: siNA target
cccgggagagccauagugg

SEQ ID NO: 86 - RNA, 19 nt, Artificial Sequence
  Description of Artificial Sequence: siNA target
cccccucccgggagagcca

SEQ ID NO: 87 - RNA, 19 nt, Artificial Sequence
  Description of Artificial Sequence: siNA target
ucccgggagagccauagug

SEQ ID NO: 88 - RNA, 19 nt, Artificial Sequence
  Description of Artificial Sequence: siNA target
ccccccucccgggagagcc

SEQ ID NO: 89 - RNA, 19 nt, Artificial Sequence
  Description of Artificial Sequence: siNA target
cccucccgggagagccaua

SEQ ID NO: 90 - RNA, 19 nt, Artificial Sequence
  Description of Artificial Sequence: siNA target
ccucccgggagagccauag

SEQ ID NO: 91 - RNA, 19 nt, Artificial Sequence
  Description of Artificial Sequence: siNA target
cucccgggagagccauagu

SEQ ID NO: 92 - RNA, 19 nt, Artificial Sequence
  Description of Artificial Sequence: siNA target
uguugccgcgcaggggccc

SEQ ID NO: 93 - RNA, 19 nt, Artificial Sequence
  Description of Artificial Sequence: siNA target
cccccccucccgggagagc

SEQ ID NO: 94 - RNA, 19 nt, Artificial Sequence
  Description of Artificial Sequence: siNA target
cauggcguuaguaugagug

SEQ ID NO: 95 - RNA, 19 nt, Artificial Sequence
  Description of Artificial Sequence: siNA target
uagccauggcguuaguaug

SEQ ID NO: 96 - RNA, 19 nt, Artificial Sequence
  Description of Artificial Sequence: siNA target
agccauggcguuaguauga

SEQ ID NO: 97 - RNA, 19 nt, Artificial Sequence
  Description of Artificial Sequence: siNA target
ccauggcguuaguaugagu

SEQ ID NO: 98 - RNA, 19 nt, Artificial Sequence
  Description of Artificial Sequence: siNA target
auggcguuaguaugagugu

SEQ ID NO: 99 - RNA, 19 nt, Artificial Sequence
  Description of Artificial Sequence: siNA target
aagcgucuagccauggcgu

SEQ ID NO: 100 - RNA, 19 nt, Artificial Sequence
  Description of Artificial Sequence: siNA target
gucuagccauggcguuagu

SEQ ID NO: 101 - RNA, 19 nt, Artificial Sequence
  Description of Artificial Sequence: siNA target
aaagcgucuagccauggcg

SEQ ID NO: 102 - RNA, 19 nt, Artificial Sequence
  Description of Artificial Sequence: siNA target
gcgucuagccauggcguua

SEQ ID NO: 103 - RNA, 19 nt, Artificial Sequence
  Description of Artificial Sequence: siNA target
gccauggcguuaguaugag

SEQ ID NO: 104 - RNA, 19 nt, Artificial Sequence
  Description of Artificial Sequence: siNA target
agcgucuagccauggcguu

SEQ ID NO: 105 - RNA, 19 nt, Artificial Sequence
  Description of Artificial Sequence: siNA target
cgucuagccauggcguuag

SEQ ID NO: 106 - RNA, 19 nt, Artificial Sequence
  Description of Artificial Sequence: siNA target
ucuagccauggcguuagua

SEQ ID NO: 107 - RNA, 19 nt, Artificial Sequence
  Description of Artificial Sequence: siNA target
gaaagcgucuagccauggc

SEQ ID NO: 108 - RNA, 19 nt, Artificial Sequence
  Description of Artificial Sequence: siNA target
cuagccauggcguuaguau

SEQ ID NO: 109 - RNA, 19 nt, Artificial Sequence
  Description of Artificial Sequence: siNA target
cacuccccugugaggaacu

SEQ ID NO: 110 - RNA, 19 nt, Artificial Sequence
  Description of Artificial Sequence: siNA target
accucaaagaaaaaccaaa

SEQ ID NO: 111 - RNA, 19 nt, Artificial Sequence
  Description of Artificial Sequence: siNA target
cgcagaaagcgucuagcca

SEQ ID NO: 112 - RNA, 19 nt, Artificial Sequence
  Description of Artificial Sequence: siNA target
ggguaaggucaucgauacc

SEQ ID NO: 113 - RNA, 19 nt, Artificial Sequence
  Description of Artificial Sequence: siNA target
cagaaagcgucuagccaug

SEQ ID NO: 114 - RNA, 19 nt, Artificial Sequence
  Description of Artificial Sequence: siNA target
aaaccucaaagaaaaacca

SEQ ID NO: 115 - RNA, 19 nt, Artificial Sequence
  Description of Artificial Sequence: siNA target
gcagaaagcgucuagccau

SEQ ID NO: 116 - RNA, 19 nt, Artificial Sequence
  Description of Artificial Sequence: siNA target
agaaagcgucuagccaugg

SEQ ID NO: 117 - RNA, 19 nt, Artificial Sequence
  Description of Artificial Sequence: siNA target
acgcagaaagcgucuagcc

SEQ ID NO: 118 - RNA, 19 nt, Artificial Sequence
  Description of Artificial Sequence: siNA target
aaccucaaagaaaaaccaa

SEQ ID NO: 119 - RNA, 19 nt, Artificial Sequence
  Description of Artificial Sequence: siNA target
uggguaaggucaucgauac

SEQ ID NO: 120 - RNA, 19 nt, Artificial Sequence
  Description of Artificial Sequence: siNA target
guaaggucaucgauacccu

SEQ ID NO: 121 - RNA, 19 nt, Artificial Sequence
  Description of Artificial Sequence: siNA target
uucacgcagaaagcgucua

SEQ ID NO: 122 - RNA, 19 nt, Artificial Sequence
  Description of Artificial Sequence: siNA target
gguaaggucaucgauaccc

SEQ ID NO: 123 - RNA, 19 nt, Artificial Sequence
  Description of Artificial Sequence: siNA target
aucacuccccugugaggaa

SEQ ID NO: 124 - RNA, 19 nt, Artificial Sequence
  Description of Artificial Sequence: siNA target
ucacuccccugugaggaac

SEQ ID NO: 125 - RNA, 19 nt, Artificial Sequence
  Description of Artificial Sequence: siNA target
ugucuucacgcagaaagcg

SEQ ID NO: 126 - RNA, 19 nt, Artificial Sequence
  Description of Artificial Sequence: siNA target
ucacgcagaaagcgucuag

SEQ ID NO: 127 - RNA, 19 nt, Artificial Sequence
  Description of Artificial Sequence: siNA target
cacgcagaaagcgucuagc

SEQ ID NO: 128 - RNA, 19 nt, Artificial Sequence
  Description of Artificial Sequence: siNA target
gaccggguccuuucuugga

SEQ ID NO: 129 - RNA, 19 nt, Artificial Sequence
  Description of Artificial Sequence: siNA target
gaggaacuacugucuucac

SEQ ID NO: 130 - RNA, 19 nt, Artificial Sequence
  Description of Artificial Sequence: siNA target
cugugaggaacuacugucu

SEQ ID NO: 131 - RNA, 19 nt, Artificial Sequence
  Description of Artificial Sequence: siNA target
ggaacuacugucuucacgc

SEQ ID NO: 132 - RNA, 19 nt, Artificial Sequence
  Description of Artificial Sequence: siNA target
acuccccugugaggaacua

SEQ ID NO: 133 - RNA, 19 nt, Artificial Sequence
  Description of Artificial Sequence: siNA target
gucuucacgcagaaagcgu

SEQ ID NO: 134 - RNA, 19 nt, Artificial Sequence
  Description of Artificial Sequence: siNA target
aggaacuacugucuucacg

SEQ ID NO: 135 - RNA, 19 nt, Artificial Sequence
  Description of Artificial Sequence: siNA target
ccugugaggaacuacuguc

SEQ ID NO: 136 - RNA, 19 nt, Artificial Sequence
  Description of Artificial Sequence: siNA target
ugugaggaacuacugucuu

SEQ ID NO: 137 - RNA, 19 nt, Artificial Sequence
  Description of Artificial Sequence: siNA target
ucuucacgcagaaagcguc

SEQ ID NO: 138 - RNA, 19 nt, Artificial Sequence
  Description of Artificial Sequence: siNA target
gaacuacugucuucacgca

SEQ ID NO: 139 - RNA, 19 nt, Artificial Sequence
  Description of Artificial Sequence: siNA target
cccugugaggaacuacugu

SEQ ID NO: 140 - RNA, 19 nt, Artificial Sequence
  Description of Artificial Sequence: siNA target
cuucacgcagaaagcgucu

SEQ ID NO: 141 - RNA, 19 nt, Artificial Sequence
  Description of Artificial Sequence: siNA target
ugaggaacuacugucuuca

SEQ ID NO: 142 - RNA, 19 nt, Artificial Sequence
  Description of Artificial Sequence: siNA target
uggcguuaguaugaguguc

SEQ ID NO: 143 - RNA, 19 nt, Artificial Sequence
  Description of Artificial Sequence: siNA target
ccccugugaggaacuacug

SEQ ID NO: 144 - RNA, 19 nt, Artificial Sequence
  Description of Artificial Sequence: siNA target
gugaggaacuacugucuuc

SEQ ID NO: 145 - RNA, 19 nt, Artificial Sequence
  Description of Artificial Sequence: siNA target
ggcguuaguaugagugucg

SEQ ID NO: 146 - RNA, 19 nt, Artificial Sequence
  Description of Artificial Sequence: siNA target
gccgaguaguguugggucg

SEQ ID NO: 147 - RNA, 19 nt, Artificial Sequence
  Description of Artificial Sequence: siNA target
acugucuucacgcagaaag

SEQ ID NO: 148 - RNA, 19 nt, Artificial Sequence
  Description of Artificial Sequence: siNA target
ugggucgcgaaaggccuug

SEQ ID NO: 149 - RNA, 19 nt, Artificial Sequence
  Description of Artificial Sequence: siNA target
cuacugucuucacgcagaa

SEQ ID NO: 150 - RNA, 19 nt, Artificial Sequence
  Description of Artificial Sequence: siNA target
cgaguaguguugggucgcg

SEQ ID NO: 151 - RNA, 19 nt, Artificial Sequence
  Description of Artificial Sequence: siNA target
guaguguugggucgcgaaa

SEQ ID NO: 152 - RNA, 19 nt, Artificial Sequence
  Description of Artificial Sequence: siNA target
uaaaccucaaagaaaaacc

SEQ ID NO: 153 - RNA, 19 nt, Artificial Sequence
  Description of Artificial Sequence: siNA target
ccgaguaguguugggucgc

SEQ ID NO: 154 - RNA, 19 nt, Artificial Sequence
  Description of Artificial Sequence: siNA target
agccgaguaguguuggguc

SEQ ID NO: 155 - RNA, 19 nt, Artificial Sequence
  Description of Artificial Sequence: siNA target
gucgcgaaaggccuugugg

SEQ ID NO: 156 - RNA, 19 nt, Artificial Sequence
  Description of Artificial Sequence: siNA target
uaguguugggucgcgaaag

SEQ ID NO: 157 - RNA, 19 nt, Artificial Sequence
  Description of Artificial Sequence: siNA target
cuagccgaguaguguuggg

SEQ ID NO: 158 - RNA, 19 nt, Artificial Sequence
  Description of Artificial Sequence: siNA target
gaguaguguugggucgcga

SEQ ID NO: 159 - RNA, 19 nt, Artificial Sequence
  Description of Artificial Sequence: siNA target
ucgcgaaaggccuuguggu

SEQ ID NO: 160 - RNA, 19 nt, Artificial Sequence
  Description of Artificial Sequence: siNA target
gcguuaguaugagugucgu

SEQ ID NO: 161 - RNA, 19 nt, Artificial Sequence
  Description of Artificial Sequence: siNA target
uagccgaguaguguugggu

SEQ ID NO: 162 - RNA, 19 nt, Artificial Sequence
  Description of Artificial Sequence: siNA target
aacuacugucuucacgcag

SEQ ID NO: 163 - RNA, 19 nt, Artificial Sequence
  Description of Artificial Sequence: siNA target
cgcgaaaggccuuguggua

SEQ ID NO: 164 - RNA, 19 nt, Artificial Sequence
  Description of Artificial Sequence: siNA target
aguguugggucgcgaaagg

SEQ ID NO: 165 - RNA, 19 nt, Artificial Sequence
  Description of Artificial Sequence: siNA target
guugggucgcgaaaggccu

SEQ ID NO: 166 - RNA, 19 nt, Artificial Sequence
  Description of Artificial Sequence: siNA target
aguaguguugggucgcgaa

SEQ ID NO: 167 - RNA, 19 nt, Artificial Sequence
  Description of Artificial Sequence: siNA target
uugggucgcgaaaggccuu

SEQ ID NO: 168 - RNA, 19 nt, Artificial Sequence
  Description of Artificial Sequence: siNA target
uccccugugaggaacuacu

SEQ ID NO: 169 - RNA, 19 nt, Artificial Sequence
  Description of Artificial Sequence: siNA target
uacugucuucacgcagaaa

SEQ ID NO: 170 - RNA, 19 nt, Artificial Sequence
  Description of Artificial Sequence: siNA target
guguugggucgcgaaaggc

SEQ ID NO: 171 - RNA, 19 nt, Artificial Sequence
  Description of Artificial Sequence: siNA target
acuacugucuucacgcaga

SEQ ID NO: 172 - RNA, 19 nt, Artificial Sequence
  Description of Artificial Sequence: siNA target
cugucuucacgcagaaagc

SEQ ID NO: 173 - RNA, 19 nt, Artificial Sequence
  Description of Artificial Sequence: siNA target
gggucgcgaaaggccuugu

SEQ ID NO: 174 - RNA, 19 nt, Artificial Sequence
  Description of Artificial Sequence: siNA target
ccuaaaccucaaagaaaaa

SEQ ID NO: 175 - RNA, 19 nt, Artificial Sequence
  Description of Artificial Sequence: siNA target
ggucgcgaaaggccuugug

SEQ ID NO: 176 - RNA, 19 nt, Artificial Sequence
  Description of Artificial Sequence: siNA target
cuaaaccucaaagaaaaac

SEQ ID NO: 177 - RNA, 19 nt, Artificial Sequence
  Description of Artificial Sequence: siNA target
uguugggucgcgaaaggcc

SEQ ID NO: 178 - RNA, 19 nt, Artificial Sequence
  Description of Artificial Sequence: siNA target
cuccccugugaggaacuac

SEQ ID NO: 179 - RNA, 19 nt, Artificial Sequence
  Description of Artificial Sequence: siNA target
uccuaaaccucaaagaaaa

SEQ ID NO: 180 - RNA, 19 nt, Artificial Sequence
  Description of Artificial Sequence: siNA target
accggguccuuucuuggau

SEQ ID NO: 181 - RNA, 19 nt, Artificial Sequence
  Description of Artificial Sequence: siNA target
aauccuaaaccucaaagaa

SEQ ID NO: 182 - RNA, 19 nt, Artificial Sequence
  Description of Artificial Sequence: siNA target
ucaaugccuggagauuugg

SEQ ID NO: 183 - RNA, 19 nt, Artificial Sequence
  Description of Artificial Sequence: siNA target
augccuggagauuugggcg

SEQ ID NO: 184 - RNA, 19 nt, Artificial Sequence
  Description of Artificial Sequence: siNA target
aaugccuggagauuugggc

SEQ ID NO: 185 - RNA, 19 nt, Artificial Sequence
  Description of Artificial Sequence: siNA target
ccgaccucaugggguacau

SEQ ID NO: 186 - RNA, 19 nt, Artificial Sequence
  Description of Artificial Sequence: siNA target
gcucaaugccuggagauuu

SEQ ID NO: 187 - RNA, 19 nt, Artificial Sequence
  Description of Artificial Sequence: siNA target
cucaaugccuggagauuug

SEQ ID NO: 188 - RNA, 19 nt, Artificial Sequence
  Description of Artificial Sequence: siNA target
gcuagccgaguaguguugg

SEQ ID NO: 189 - RNA, 19 nt, Artificial Sequence
  Description of Artificial Sequence: siNA target
cgcucaaugccuggagauu

SEQ ID NO: 190 - RNA, 19 nt, Artificial Sequence
  Description of Artificial Sequence: siNA target
caaugccuggagauuuggg

SEQ ID NO: 191 - RNA, 19 nt, Artificial Sequence
  Description of Artificial Sequence: siNA target
gccgaccucaugggguaca

SEQ ID NO: 192 - RNA, 19 nt, Artificial Sequence
  Description of Artificial Sequence: siNA target
auccuaaaccucaaagaaa

SEQ ID NO: 193 - RNA, 19 nt, Artificial Sequence
  Description of Artificial Sequence: siNA target
agauuugggcgugcccccg

SEQ ID NO: 194 - RNA, 19 nt, Artificial Sequence
  Description of Artificial Sequence: siNA target
cccgcucaaugccuggaga

SEQ ID NO: 195 - RNA, 19 nt, Artificial Sequence
  Description of Artificial Sequence: siNA target
gagauuugggcgugccccc

SEQ ID NO: 196 - RNA, 19 nt, Artificial Sequence
  Description of Artificial Sequence: siNA target
ggagauuugggcgugcccc

SEQ ID NO: 197 - RNA, 19 nt, Artificial Sequence
  Description of Artificial Sequence: siNA target
gauuugggcgugcccccgc

SEQ ID NO: 198 - RNA, 19 nt, Artificial Sequence
  Description of Artificial Sequence: siNA target
ccgcucaaugccuggagau

SEQ ID NO: 199 - RNA, 19 nt, Artificial Sequence
  Description of Artificial Sequence: siNA target
aguacaccggaauugccag

SEQ ID NO: 200 - RNA, 19 nt, Artificial Sequence
  Description of Artificial Sequence: siNA target
uacaccggaauugccagga

SEQ ID NO: 201 - RNA, 19 nt, Artificial Sequence
  Description of Artificial Sequence: siNA target
gaguacaccggaauugcca

SEQ ID NO: 202 - RNA, 19 nt, Artificial Sequence
  Description of Artificial Sequence: siNA target
guacaccggaauugccagg

SEQ ID NO: 203 - RNA, 19 nt, Artificial Sequence
  Description of Artificial Sequence: siNA target
uugccgcgcaggggcccca

SEQ ID NO: 204 - RNA, 19 nt, Artificial Sequence
  Description of Artificial Sequence: siNA target
cuggagauuugggcgugcc

SEQ ID NO: 205 - RNA, 19 nt, Artificial Sequence
  Description of Artificial Sequence: siNA target
guugccgcgcaggggcccc

SEQ ID NO: 206 - RNA, 19 nt, Artificial Sequence
  Description of Artificial Sequence: siNA target
gccuggagauuugggcgug

SEQ ID NO: 207 - RNA, 19 nt, Artificial Sequence
  Description of Artificial Sequence: siNA target
uggagauuugggcgugccc

SEQ ID NO: 208 - RNA, 19 nt, Artificial Sequence
  Description of Artificial Sequence: siNA target
ccuggagauuugggcgugc

SEQ ID NO: 209 - RNA, 19 nt, Artificial Sequence
  Description of Artificial Sequence: siNA target
ugcuagccgaguaguguug

SEQ ID NO: 210 - RNA, 19 nt, Artificial Sequence
  Description of Artificial Sequence: siNA target
ugccuggagauuugggcgu

SEQ ID NO: 211 - RNA, 19 nt, Artificial Sequence
  Description of Artificial Sequence: siNA target
cugcuagccgaguaguguu

SEQ ID NO: 212 - RNA, 19 nt, Artificial Sequence
  Description of Artificial Sequence: siNA target
acugcuagccgaguagugu

SEQ ID NO: 213 - RNA, 19 nt, Artificial Sequence
  Description of Artificial Sequence: siNA target
gacugcuagccgaguagug

SEQ ID NO: 214 - RNA, 19 nt, Artificial Sequence
  Description of Artificial Sequence: siNA target
agacugcuagccgaguagu

SEQ ID NO: 215 - RNA, 19 nt, Artificial Sequence
  Description of Artificial Sequence: siNA target
acccgcucaaugccuggag

SEQ ID NO: 216 - RNA, 19 nt, Artificial Sequence
  Description of Artificial Sequence: siNA target
aacccgcucaaugccugga

SEQ ID NO: 217 - RNA, 19 nt, Artificial Sequence
  Description of Artificial Sequence: siNA target
ugccgcgcaggggccccag

SEQ ID NO: 218 - RNA, 19 nt, Artificial Sequence
  Description of Artificial Sequence: siNA target
aggggccccagguugggug

SEQ ID NO: 219 - RNA, 19 nt, Artificial Sequence
  Description of Artificial Sequence: siNA target
gggccccagguugggugug

SEQ ID NO: 220 - RNA, 19 nt, Artificial Sequence
  Description of Artificial Sequence: siNA target
caggggccccagguugggu

SEQ ID NO: 221 - RNA, 19 nt, Artificial Sequence
  Description of Artificial Sequence: siNA target
ggccccagguugggugugc

SEQ ID NO: 222 - RNA, 19 nt, Artificial Sequence
  Description of Artificial Sequence: siNA target
cgcaggggccccagguugg

SEQ ID NO: 223 - RNA, 19 nt, Artificial Sequence
  Description of Artificial Sequence: siNA target
ugggcaggauggcuccugu

SEQ ID NO: 224 - RNA, 19 nt, Artificial Sequence
  Description of Artificial Sequence: siNA target
gccccagguugggugugcg

SEQ ID NO: 225 - RNA, 19 nt, Artificial Sequence
  Description of Artificial Sequence: siNA target
gcaggggccccagguuggg

SEQ ID NO: 226 - RNA, 19 nt, Artificial Sequence
  Description of Artificial Sequence: siNA target
gggcaggauggcuccuguc

SEQ ID NO: 227 - RNA, 19 nt, Artificial Sequence
  Description of Artificial Sequence: siNA target
ggggccccagguugggugu

SEQ ID NO: 228 - RNA, 19 nt, Artificial Sequence
  Description of Artificial Sequence: siNA target
gccgcgcaggggccccagg

SEQ ID NO: 229 - RNA, 19 nt, Artificial Sequence
  Description of Artificial Sequence: siNA target
gcgcaggggccccagguug

SEQ ID NO: 230 - RNA, 19 nt, Artificial Sequence
  Description of Artificial Sequence: siNA target
cgcgcaggggccccagguu

SEQ ID NO: 231 - RNA, 19 nt, Artificial Sequence
  Description of Artificial Sequence: siNA target
ccgcgcaggggccccaggu

SEQ ID NO: 232 - RNA, 19 nt, Artificial Sequence
  Description of Artificial Sequence: siNA target
aggacgaccggguccuuuc

SEQ ID NO: 233 - RNA, 19 nt, Artificial Sequence
  Description of Artificial Sequence: siNA target
caggacgaccggguccuuu

SEQ ID NO: 234 - RNA, 19 nt, Artificial Sequence
  Description of Artificial Sequence: siNA target
ugccaggacgaccgggucc

SEQ ID NO: 235 - RNA, 19 nt, Artificial Sequence
  Description of Artificial Sequence: siNA target
auugccaggacgaccgggu

SEQ ID NO: 236 - RNA, 19 nt, Artificial Sequence
  Description of Artificial Sequence: siNA target
aauugccaggacgaccggg

SEQ ID NO: 237 - RNA, 19 nt, Artificial Sequence
  Description of Artificial Sequence: siNA target
uugccaggacgaccggguc

SEQ ID NO: 238 - RNA, 19 nt, Artificial Sequence
  Description of Artificial Sequence: siNA target
ccaggacgaccggguccuu

SEQ ID NO: 239 - RNA, 19 nt, Artificial Sequence
  Description of Artificial Sequence: siNA target
gccaggacgaccggguccu

SEQ ID NO: 240 - RNA, 19 nt, Artificial Sequence
  Description of Artificial Sequence: siNA target
gaauugccaggacgaccgg

SEQ ID NO: 241 - RNA, 19 nt, Artificial Sequence
  Description of Artificial Sequence: siNA target
acgaccggguccuuucuug

SEQ ID NO: 242 - RNA, 19 nt, Artificial Sequence
  Description of Artificial Sequence: siNA target
gacgaccggguccuuucuu

SEQ ID NO: 243 - RNA, 19 nt, Artificial Sequence
  Description of Artificial Sequence: siNA target
cgaccggguccuuucuugg

SEQ ID NO: 244 - RNA, 19 nt, Artificial Sequence
  Description of Artificial Sequence: siNA target
ggacgaccggguccuuucu

SEQ ID NO: 245 - RNA, 19 nt, Artificial Sequence
  Description of Artificial Sequence: siNA target
ccggaauugccaggacgac

SEQ ID NO: 246 - RNA, 19 nt, Artificial Sequence
  Description of Artificial Sequence: siNA target
acaccggaauugccaggac

SEQ ID NO: 247 - RNA, 19 nt, Artificial Sequence
  Description of Artificial Sequence: siNA target
accggaauugccaggacga

SEQ ID NO: 248 - RNA, 19 nt, Artificial Sequence
  Description of Artificial Sequence: siNA target
cggaauugccaggacgacc

SEQ ID NO: 249 - RNA, 19 nt, Artificial Sequence
  Description of Artificial Sequence: siNA target
ggaauugccaggacgaccg

SEQ ID NO: 250 - RNA, 19 nt, Artificial Sequence
  Description of Artificial Sequence: siNA target
caccggaauugccaggacg

SEQ ID NO: 251 - RNA, 19 nt, Artificial Sequence
  Description of Artificial Sequence: siNA target
ccccagguugggugugcgc

SEQ ID NO: 252 - RNA, 19 nt, Artificial Sequence
  Description of Artificial Sequence: siNA target
gaucguugguggaguuuac

SEQ ID NO: 253 - RNA, 19 nt, Artificial Sequence
  Description of Artificial Sequence: siNA target
cagaucguugguggaguuu

SEQ ID NO: 254 - RNA, 19 nt, Artificial Sequence
  Description of Artificial Sequence: siNA target
agaucguugguggaguuua

SEQ ID NO: 255 - RNA, 19 nt, Artificial Sequence
  Description of Artificial Sequence: siNA target
cccagguugggugugcgcg

SEQ ID NO: 256 - RNA, 19 nt, Artificial Sequence
  Description of Artificial Sequence: siNA target
ccagguugggugugcgcgc

SEQ ID NO: 257 - RNA, 19 nt, Artificial Sequence
  Description of Artificial Sequence: siNA target
agguugggugugcgcgcga

SEQ ID NO: 258 - RNA, 19 nt, Artificial Sequence
  Description of Artificial Sequence: siNA target
cagguugggugugcgcgcg

SEQ ID NO: 259 - RNA, 19 nt, Artificial Sequence
  Description of Artificial Sequence: siNA target
gguugggugugcgcgcgac

SEQ ID NO: 260 - RNA, 19 nt, Artificial Sequence
  Description of Artificial Sequence: siNA target
gaaaaaccaaacguaacac

SEQ ID NO: 261 - RNA, 19 nt, Artificial Sequence
  Description of Artificial Sequence: siNA target
agaaaaaccaaacguaaca

SEQ ID NO: 262 - RNA, 19 nt, Artificial Sequence
  Description of Artificial Sequence: siNA target
aaccaaacguaacaccaac

SEQ ID NO: 263 - RNA, 19 nt, Artificial Sequence
  Description of Artificial Sequence: siNA target
aaagaaaaaccaaacguaa

SEQ ID NO: 264 - RNA, 19 nt, Artificial Sequence
  Description of Artificial Sequence: siNA target
aaaaaccaaacguaacacc

SEQ ID NO: 265 - RNA, 19 nt, Artificial Sequence
  Description of Artificial Sequence: siNA target
aagaaaaaccaaacguaac

SEQ ID NO: 266 - RNA, 19 nt, Artificial Sequence
  Description of Artificial Sequence: siNA target
caaagaaaaaccaaacgua

SEQ ID NO: 267 - RNA, 19 nt, Artificial Sequence
  Description of Artificial Sequence: siNA target
acccccggcguaggucgcg

SEQ ID NO: 268 - RNA, 19 nt, Artificial Sequence
  Description of Artificial Sequence: siNA target
gacccccggcguaggucgc

SEQ ID NO: 269 - RNA, 19 nt, Artificial Sequence
  Description of Artificial Sequence: siNA target
cguuaguaugagugucgug

SEQ ID NO: 270 - RNA, 19 nt, Artificial Sequence
  Description of Artificial Sequence: siNA target
guuaguaugagugucgugc

SEQ ID NO: 271 - RNA, 19 nt, Artificial Sequence
  Description of Artificial Sequence: siNA target
uuaguaugagugucgugca

SEQ ID NO: 272 - RNA, 19 nt, Artificial Sequence
  Description of Artificial Sequence: siNA target
ccaaacguaacaccaaccg

SEQ ID NO: 273 - RNA, 19 nt, Artificial Sequence
  Description of Artificial Sequence: siNA target
accaaacguaacaccaacc

SEQ ID NO: 274 - RNA, 19 nt, Artificial Sequence
  Description of Artificial Sequence: siNA target
uugggcgugcccccgcgag

SEQ ID NO: 275 - RNA, 19 nt, Artificial Sequence
  Description of Artificial Sequence: siNA target
auuugggcgugcccccgcg

SEQ ID NO: 276 - RNA, 19 nt, Artificial Sequence
  Description of Artificial Sequence: siNA target
uuugggcgugcccccgcga

SEQ ID NO: 277 - RNA, 19 nt, Artificial Sequence
  Description of Artificial Sequence: siNA target
aaaccaaacguaacaccaa

SEQ ID NO: 278 - RNA, 19 nt, Artificial Sequence
  Description of Artificial Sequence: siNA target
ugggcgugcccccgcgaga

SEQ ID NO: 279 - RNA, 19 nt, Artificial Sequence
  Description of Artificial Sequence: siNA target
gucagaucguugguggagu

SEQ ID NO: 280 - RNA, 19 nt, Artificial Sequence
  Description of Artificial Sequence: siNA target
gugucgugcagccuccagg

SEQ ID NO: 281 - RNA, 19 nt, Artificial Sequence
  Description of Artificial Sequence: siNA target
ggucagaucguugguggag

SEQ ID NO: 282 - RNA, 19 nt, Artificial Sequence
  Description of Artificial Sequence: siNA target
agugucgugcagccuccag

SEQ ID NO: 283 - RNA, 19 nt, Artificial Sequence
  Description of Artificial Sequence: siNA target
gagugucgugcagccucca

SEQ ID NO: 284 - RNA, 19 nt, Artificial Sequence
  Description of Artificial Sequence: siNA target
ucguagaccgugcaccaug

SEQ ID NO: 285 - RNA, 19 nt, Artificial Sequence
  Description of Artificial Sequence: siNA target
gaccgugcaccaugagcac

SEQ ID NO: 286 - RNA, 19 nt, Artificial Sequence
  Description of Artificial Sequence: siNA target
aguaugagugucgugcagc

SEQ ID NO: 287 - RNA, 19 nt, Artificial Sequence
  Description of Artificial Sequence: siNA target
uaguaugagugucgugcag

SEQ ID NO: 288 - RNA, 19 nt, Artificial Sequence
  Description of Artificial Sequence: siNA target
ucagaucguugguggaguu

SEQ ID NO: 289 - RNA, 19 nt, Artificial Sequence
  Description of Artificial Sequence: siNA target
agaccgugcaccaugagca

SEQ ID NO: 290 - RNA, 19 nt, Artificial Sequence
  Description of Artificial Sequence: siNA target
aaaaccaaacguaacacca

SEQ ID NO: 291 - RNA, 19 nt, Artificial Sequence
  Description of Artificial Sequence: siNA target
guagaccgugcaccaugag

SEQ ID NO: 292 - RNA, 19 nt, Artificial Sequence
  Description of Artificial Sequence: siNA target
cucguagaccgugcaccau

SEQ ID NO: 293 - RNA, 19 nt, Artificial Sequence
  Description of Artificial Sequence: siNA target
cguagaccgugcaccauga

SEQ ID NO: 294 - RNA, 19 nt, Artificial Sequence
  Description of Artificial Sequence: siNA target
ccugggcucagcccgggua

SEQ ID NO: 295 - RNA, 19 nt, Artificial Sequence
  Description of Artificial Sequence: siNA target
uagaccgugcaccaugagc

SEQ ID NO: 296 - RNA, 19 nt, Artificial Sequence
  Description of Artificial Sequence: siNA target
ggucucguagaccgugcac

SEQ ID NO: 297 - RNA, 19 nt, Artificial Sequence
  Description of Artificial Sequence: siNA target
ucucguagaccgugcacca

SEQ ID NO: 298 - RNA, 19 nt, Artificial Sequence
  Description of Artificial Sequence: siNA target
gucucguagaccgugcacc

SEQ ID NO: 299 - RNA, 19 nt, Artificial Sequence
  Description of Artificial Sequence: siNA target
uuggguaaggucaucgaua

SEQ ID NO: 300 - RNA, 19 nt, Artificial Sequence
  Description of Artificial Sequence: siNA target
ucgccgaccucauggggua

SEQ ID NO: 301 - RNA, 19 nt, Artificial Sequence
  Description of Artificial Sequence: siNA target
ccucaaagaaaaaccaaac

SEQ ID NO: 302 - RNA, 19 nt, Artificial Sequence
  Description of Artificial Sequence: siNA target
gggcgugcccccgcgagac

SEQ ID NO: 303 - RNA, 19 nt, Artificial Sequence
  Description of Artificial Sequence: siNA target
ggaugaaccggcugauagc

SEQ ID NO: 304 - RNA, 19 nt, Artificial Sequence
  Description of Artificial Sequence: siNA target
uggaugaaccggcugauag

SEQ ID NO: 305 - RNA, 19 nt, Artificial Sequence
  Description of Artificial Sequence: siNA target
cucaaagaaaaaccaaacg

SEQ ID NO: 306 - RNA, 19 nt, Artificial Sequence
  Description of Artificial Sequence: siNA target
aggaagacuuccgagcggu

SEQ ID NO: 307 - RNA, 19 nt, Artificial Sequence
  Description of Artificial Sequence: siNA target
ucaaagaaaaaccaaacgu

SEQ ID NO: 308 - RNA, 19 nt, Artificial Sequence
  Description of Artificial Sequence: siNA target
ggaagacuuccgagcgguc

SEQ ID NO: 309 - RNA, 19 nt, Artificial Sequence
  Description of Artificial Sequence: siNA target
cgccgaccucaugggguac

SEQ ID NO: 310 - RNA, 19 nt, Artificial Sequence
  Description of Artificial Sequence: siNA target
cuuccgagcggucgcaacc

SEQ ID NO: 311 - RNA, 19 nt, Artificial Sequence
  Description of Artificial Sequence: siNA target
ggcgugcccccgcgagacu

SEQ ID NO: 312 - RNA, 19 nt, Artificial Sequence
  Description of Artificial Sequence: siNA target
uaugagugucgugcagccu

SEQ ID NO: 313 - RNA, 19 nt, Artificial Sequence
  Description of Artificial Sequence: siNA target
ugcccccgcgagacugcua

SEQ ID NO: 314 - RNA, 19 nt, Artificial Sequence
  Description of Artificial Sequence: siNA target
cgagacugcuagccgagua

SEQ ID NO: 315 - RNA, 19 nt, Artificial Sequence
  Description of Artificial Sequence: siNA target
ugagugucgugcagccucc

SEQ ID NO: 316 - RNA, 19 nt, Artificial Sequence
  Description of Artificial Sequence: siNA target
gcccccgcgagacugcuag

SEQ ID NO: 317 - RNA, 19 nt, Artificial Sequence
  Description of Artificial Sequence: siNA target
gagacugcuagccgaguag

SEQ ID NO: 318 - RNA, 19 nt, Artificial Sequence
  Description of Artificial Sequence: siNA target
cccccgcgagacugcuagc

SEQ ID NO: 319 - RNA, 19 nt, Artificial Sequence
  Description of Artificial Sequence: siNA target
cgcgagacugcuagccgag

SEQ ID NO: 320 - RNA, 19 nt, Artificial Sequence
  Description of Artificial Sequence: siNA target
guaugagugucgugcagcc

SEQ ID NO: 321 - RNA, 19 nt, Artificial Sequence
  Description of Artificial Sequence: siNA target
augagugucgugcagccuc

SEQ ID NO: 322 - RNA, 19 nt, Artificial Sequence
  Description of Artificial Sequence: siNA target
gcgagacugcuagccgagu

SEQ ID NO: 323 - RNA, 19 nt, Artificial Sequence
  Description of Artificial Sequence: siNA target
ccccgcgagacugcuagcc

SEQ ID NO: 324 - RNA, 19 nt, Artificial Sequence
  Description of Artificial Sequence: siNA target
ccgcgagacugcuagccga

SEQ ID NO: 325 - RNA, 19 nt, Artificial Sequence
  Description of Artificial Sequence: siNA target
cccgcgagacugcuagccg

SEQ ID NO: 326 - RNA, 19 nt, Artificial Sequence
  Description of Artificial Sequence: siNA target
gcgugcccccgcgagacug

SEQ ID NO: 327 - RNA, 19 nt, Artificial Sequence
  Description of Artificial Sequence: siNA target
gacccccccucccgggaga

SEQ ID NO: 328 - RNA, 19 nt, Artificial Sequence
  Description of Artificial Sequence: siNA target
cggguccuuucuuggauca

SEQ ID NO: 329 - RNA, 19 nt, Artificial Sequence
  Description of Artificial Sequence: siNA target
gugcccccgcgagacugcu

SEQ ID NO: 330 - RNA, 19 nt, Artificial Sequence
  Description of Artificial Sequence: siNA target
cgugcccccgcgagacugc

SEQ ID NO: 331 - RNA, 19 nt, Artificial Sequence
  Description of Artificial Sequence: siNA target
uucgccgaccucauggggu

SEQ ID NO: 332 - RNA, 19 nt, Artificial Sequence
  Description of Artificial Sequence: siNA target
cgcccacaggacgucaagu

SEQ ID NO: 333 - RNA, 19 nt, Artificial Sequence
  Description of Artificial Sequence: siNA target
gcccacaggacgucaaguu

SEQ ID NO: 334 - RNA, 19 nt, Artificial Sequence
  Description of Artificial Sequence: siNA target
acccccccucccgggagag

SEQ ID NO: 335 - RNA, 19 nt, Artificial Sequence
  Description of Artificial Sequence: siNA target
ggacccccccucccgggag

SEQ ID NO: 336 - RNA, 19 nt, Artificial Sequence
  Description of Artificial Sequence: siNA target
ccggguccuuucuuggauc

SEQ ID NO: 337 - RNA, 19 nt, Artificial Sequence
  Description of Artificial Sequence: siNA target
caggacccccccucccggg

SEQ ID NO: 338 - RNA, 19 nt, Artificial Sequence
  Description of Artificial Sequence: siNA target
aggacgucaaguucccggg

SEQ ID NO: 339 - RNA, 19 nt, Artificial Sequence
  Description of Artificial Sequence: siNA target
aggacccccccucccggga

SEQ ID NO: 340 - RNA, 19 nt, Artificial Sequence
  Description of Artificial Sequence: siNA target
ccacaggacgucaaguucc

SEQ ID NO: 341 - RNA, 19 nt, Artificial Sequence
  Description of Artificial Sequence: siNA target
caggacgucaaguucccgg

SEQ ID NO: 342 - RNA, 19 nt, Artificial Sequence
  Description of Artificial Sequence: siNA target
acaggacgucaaguucccg

SEQ ID NO: 343 - RNA, 19 nt, Artificial Sequence
  Description of Artificial Sequence: siNA target
cacaggacgucaaguuccc

SEQ ID NO: 344 - RNA, 19 nt, Artificial Sequence
  Description of Artificial Sequence: siNA target
caguggaugaaccggcuga

SEQ ID NO: 345 - RNA, 19 nt, Artificial Sequence
  Description of Artificial Sequence: siNA target
gggcucagcccggguaccc

SEQ ID NO: 346 - RNA, 19 nt, Artificial Sequence
  Description of Artificial Sequence: siNA target
ccgagcggucgcaaccucg

SEQ ID NO: 347 - RNA, 19 nt, Artificial Sequence
  Description of Artificial Sequence: siNA target
cugggcucagcccggguac

SEQ ID NO: 348 - RNA, 19 nt, Artificial Sequence
  Description of Artificial Sequence: siNA target
aguggaugaaccggcugau

SEQ ID NO: 349 - RNA, 19 nt, Artificial Sequence
  Description of Artificial Sequence: siNA target
uccgagcggucgcaaccuc

SEQ ID NO: 350 - RNA, 19 nt, Artificial Sequence
  Description of Artificial Sequence: siNA target
ugggcucagcccggguacc

SEQ ID NO: 351 - RNA, 19 nt, Artificial Sequence
  Description of Artificial Sequence: siNA target
gguacccuuggccccucua

SEQ ID NO: 352 - RNA, 19 nt, Artificial Sequence
  Description of Artificial Sequence: siNA target
uuccgagcggucgcaaccu

SEQ ID NO: 353 - RNA, 19 nt, Artificial Sequence
  Description of Artificial Sequence: siNA target
ggguacccuuggccccucu

SEQ ID NO: 354 - RNA, 19 nt, Artificial Sequence
  Description of Artificial Sequence: siNA target
ggguccuuucuuggaucaa

SEQ ID NO: 355 - RNA, 19 nt, Artificial Sequence
  Description of Artificial Sequence: siNA target
cccacaggacgucaaguuc

SEQ ID NO: 356 - RNA, 19 nt, Artificial Sequence
  Description of Artificial Sequence: siNA target
gguugcucuuucucuaucu

SEQ ID NO: 357 - RNA, 19 nt, Artificial Sequence
  Description of Artificial Sequence: siNA target
gugggcaggauggcuccug

SEQ ID NO: 358 - RNA, 19 nt, Artificial Sequence
  Description of Artificial Sequence: siNA target
ggugggcaggauggcuccu

SEQ ID NO: 359 - RNA, 19 nt, Artificial Sequence
  Description of Artificial Sequence: siNA target
guugcucuuucucuaucuu

SEQ ID NO: 360 - RNA, 19 nt, Artificial Sequence
  Description of Artificial Sequence: siNA target
guggaugaaccggcugaua

SEQ ID NO: 361 - RNA, 19 nt, Artificial Sequence
  Description of Artificial Sequence: siNA target
ccaggacccccccucccgg

SEQ ID NO: 362 - RNA, 19 nt, Artificial Sequence
  Description of Artificial Sequence: siNA target
gggugggcaggauggcucc

SEQ ID NO: 363 - RNA, 19 nt, Artificial Sequence
  Description of Artificial Sequence: siNA target
cuucacggaggcuaugacu

SEQ ID NO: 364 - RNA, 19 nt, Artificial Sequence
  Description of Artificial Sequence: siNA target
accgccgcccacaggacgu

SEQ ID NO: 365 - RNA, 19 nt, Artificial Sequence
  Description of Artificial Sequence: siNA target
uccaggacccccccucccg

SEQ ID NO: 366 - RNA, 19 nt, Artificial Sequence
  Description of Artificial Sequence: siNA target
auaugaugaugaacugguc

SEQ ID NO: 367 - RNA, 19 nt, Artificial Sequence
  Description of Artificial Sequence: siNA target
uucacggaggcuaugacua

SEQ ID NO: 368 - RNA, 19 nt, Artificial Sequence
  Description of Artificial Sequence: siNA target
ucacggaggcuaugacuag

SEQ ID NO: 369 - RNA, 19 nt, Artificial Sequence
  Description of Artificial Sequence: siNA target
augaaccggcugauagcgu

SEQ ID NO: 370 - RNA, 19 nt, Artificial Sequence
  Description of Artificial Sequence: siNA target
gggauaugaugaugaacug

SEQ ID NO: 371 - RNA, 19 nt, Artificial Sequence
  Description of Artificial Sequence: siNA target
ugcaguggaugaaccggcu

SEQ ID NO: 372 - RNA, 19 nt, Artificial Sequence
  Description of Artificial Sequence: siNA target
gugcaguggaugaaccggc

SEQ ID NO: 373 - RNA, 19 nt, Artificial Sequence
  Description of Artificial Sequence: siNA target
ugaaccggcugauagcguu

SEQ ID NO: 374 - RNA, 19 nt, Artificial Sequence
  Description of Artificial Sequence: siNA target
ggauaugaugaugaacugg

SEQ ID NO: 375 - RNA, 19 nt, Artificial Sequence
  Description of Artificial Sequence: siNA target
gcucuuucucuaucuuccu

SEQ ID NO: 376 - RNA, 19 nt, Artificial Sequence
  Description of Artificial Sequence: siNA target
gggggcgacacuccaccau

SEQ ID NO: 377 - RNA, 19 nt, Artificial Sequence
  Description of Artificial Sequence: siNA target
gaugaaccggcugauagcg

SEQ ID NO: 378 - RNA, 19 nt, Artificial Sequence
  Description of Artificial Sequence: siNA target
gauaugaugaugaacuggu

SEQ ID NO: 379 - RNA, 19 nt, Artificial Sequence
  Description of Artificial Sequence: siNA target
ugggauaugaugaugaacu

SEQ ID NO: 380 - RNA, 19 nt, Artificial Sequence
  Description of Artificial Sequence: siNA target
uugcucuuucucuaucuuc

SEQ ID NO: 381 - RNA, 19 nt, Artificial Sequence
  Description of Artificial Sequence: siNA target
ugggggcgacacuccacca

SEQ ID NO: 382 - RNA, 19 nt, Artificial Sequence
  Description of Artificial Sequence: siNA target
ugcucuuucucuaucuucc

SEQ ID NO: 383 - RNA, 19 nt, Artificial Sequence
  Description of Artificial Sequence: siNA target
gguccuuucuuggaucaac

SEQ ID NO: 384 - RNA, 19 nt, Artificial Sequence
  Description of Artificial Sequence: siNA target
aagacuuccgagcggucgc

SEQ ID NO: 385 - RNA, 19 nt, Artificial Sequence
  Description of Artificial Sequence: siNA target
agcccggguacccuuggcc

SEQ ID NO: 386 - RNA, 19 nt, Artificial Sequence
  Description of Artificial Sequence: siNA target
uuucuuggaucaacccgcu

SEQ ID NO: 387 - RNA, 19 nt, Artificial Sequence
  Description of Artificial Sequence: siNA target
cagcccggguacccuuggc

SEQ ID NO: 388 - RNA, 19 nt, Artificial Sequence
  Description of Artificial Sequence: siNA target
agacuuccgagcggucgca

SEQ ID NO: 389 - RNA, 19 nt, Artificial Sequence
  Description of Artificial Sequence: siNA target
uucuuggaucaacccgcuc

SEQ ID NO: 390 - RNA, 19 nt, Artificial Sequence
  Description of Artificial Sequence: siNA target
cccggguacccuuggcccc

SEQ ID NO: 391 - RNA, 19 nt, Artificial Sequence
  Description of Artificial Sequence: siNA target
guccuuucuuggaucaacc

SEQ ID NO: 392 - RNA, 19 nt, Artificial Sequence
  Description of Artificial Sequence: siNA target
cuuucuuggaucaacccgc

SEQ ID NO: 393 - RNA, 19 nt, Artificial Sequence
  Description of Artificial Sequence: siNA target
ccuuucuuggaucaacccg

SEQ ID NO: 394 - RNA, 19 nt, Artificial Sequence
  Description of Artificial Sequence: siNA target
uccuuucuuggaucaaccc

SEQ ID NO: 395 - RNA, 19 nt, Artificial Sequence
  Description of Artificial Sequence: siNA target
aaguucccgggcggugguc

SEQ ID NO: 396 - RNA, 19 nt, Artificial Sequence
  Description of Artificial Sequence: siNA target
gcaguggaugaaccggcug

SEQ ID NO: 397 - RNA, 19 nt, Artificial Sequence
  Description of Artificial Sequence: siNA target
ccggguacccuuggccccu

SEQ ID NO: 398 - RNA, 19 nt, Artificial Sequence
  Description of Artificial Sequence: siNA target
aguucccgggcggugguca

SEQ ID NO: 399 - RNA, 19 nt, Artificial Sequence
  Description of Artificial Sequence: siNA target
cuuggaucaacccgcucaa

SEQ ID NO: 400 - RNA, 19 nt, Artificial Sequence
  Description of Artificial Sequence: siNA target
ggaucaacccgcucaaugc

SEQ ID NO: 401 - RNA, 19 nt, Artificial Sequence
  Description of Artificial Sequence: siNA target
acuuccgagcggucgcaac

SEQ ID NO: 402 - RNA, 19 nt, Artificial Sequence
  Description of Artificial Sequence: siNA target
ucuuggaucaacccgcuca

SEQ ID NO: 403 - RNA, 19 nt, Artificial Sequence
  Description of Artificial Sequence: siNA target
uuggaucaacccgcucaau

SEQ ID NO: 404 - RNA, 19 nt, Artificial Sequence
  Description of Artificial Sequence: siNA target
aaccgccgcccacaggacg

SEQ ID NO: 405 - RNA, 19 nt, Artificial Sequence
  Description of Artificial Sequence: siNA target
gcgugaacuaugcaacagg

SEQ ID NO: 406 - RNA, 19 nt, Artificial Sequence
  Description of Artificial Sequence: siNA target
aucaacccgcucaaugccu

SEQ ID NO: 407 - RNA, 19 nt, Artificial Sequence
  Description of Artificial Sequence: siNA target
gaucaacccgcucaaugcc

SEQ ID NO: 408 - RNA, 19 nt, Artificial Sequence
  Description of Artificial Sequence: siNA target
caacccgcucaaugccugg

SEQ ID NO: 409 - RNA, 19 nt, Artificial Sequence
  Description of Artificial Sequence: siNA target
gcuucgccgaccucauggg

SEQ ID NO: 410 - RNA, 19 nt, Artificial Sequence
  Description of Artificial Sequence: siNA target
gacuuccgagcggucgcaa

SEQ ID NO: 411 - RNA, 19 nt, Artificial Sequence
  Description of Artificial Sequence: siNA target
ucaacccgcucaaugccug

SEQ ID NO: 412 - RNA, 19 nt, Artificial Sequence
  Description of Artificial Sequence: siNA target
ggcuucgccgaccucaugg

SEQ ID NO: 413 - RNA, 19 nt, Artificial Sequence
  Description of Artificial Sequence: siNA target
uggaucaacccgcucaaug

SEQ ID NO: 414 - RNA, 19 nt, Artificial Sequence
  Description of Artificial Sequence: siNA target
cgggcgguggucagaucgu

SEQ ID NO: 415 - RNA, 19 nt, Artificial Sequence
  Description of Artificial Sequence: siNA target
cuuggccccucuauggcaa

SEQ ID NO: 416 - RNA, 19 nt, Artificial Sequence
  Description of Artificial Sequence: siNA target
ccgggcgguggucagaucg

SEQ ID NO: 417 - RNA, 19 nt, Artificial Sequence
  Description of Artificial Sequence: siNA target
uggggugggcaggauggcu

SEQ ID NO: 418 - RNA, 19 nt, Artificial Sequence
  Description of Artificial Sequence: siNA target
ggaguuuaccuguugccgc

SEQ ID NO: 419 - RNA, 19 nt, Artificial Sequence
  Description of Artificial Sequence: siNA target
ccuuggccccucuauggca

SEQ ID NO: 420 - RNA, 19 nt, Artificial Sequence
  Description of Artificial Sequence: siNA target
guggaguuuaccuguugcc

SEQ ID NO: 421 - RNA, 19 nt, Artificial Sequence
  Description of Artificial Sequence: siNA target
gguggaguuuaccuguugc

SEQ ID NO: 422 - RNA, 19 nt, Artificial Sequence
  Description of Artificial Sequence: siNA target
uucccgggcgguggucaga

SEQ ID NO: 423 - RNA, 19 nt, Artificial Sequence
  Description of Artificial Sequence: siNA target
ugaacuaugcaacagggaa

SEQ ID NO: 424 - RNA, 19 nt, Artificial Sequence
  Description of Artificial Sequence: siNA target
aguuuaccuguugccgcgc

SEQ ID NO: 425 - RNA, 19 nt, Artificial Sequence
  Description of Artificial Sequence: siNA target
gugaacuaugcaacaggga

SEQ ID NO: 426 - RNA, 19 nt, Artificial Sequence
  Description of Artificial Sequence: siNA target
uuaccuguugccgcgcagg

SEQ ID NO: 427 - RNA, 19 nt, Artificial Sequence
  Description of Artificial Sequence: siNA target
ucccgggcgguggucagau

SEQ ID NO: 428 - RNA, 19 nt, Artificial Sequence
  Description of Artificial Sequence: siNA target
guucccgggcgguggucag

SEQ ID NO: 429 - RNA, 19 nt, Artificial Sequence
  Description of Artificial Sequence: siNA target
gcccggguacccuuggccc

SEQ ID NO: 430 - RNA, 19 nt, Artificial Sequence
  Description of Artificial Sequence: siNA target
aaggagaugaaggcgaagg

SEQ ID NO: 431 - RNA, 19 nt, Artificial Sequence
  Description of Artificial Sequence: siNA target
aggagaugaaggcgaaggc

SEQ ID NO: 432 - RNA, 19 nt, Artificial Sequence
  Description of Artificial Sequence: siNA target
guuuaccuguugccgcgca

SEQ ID NO: 433 - RNA, 19 nt, Artificial Sequence
  Description of Artificial Sequence: siNA target
cuguugccgcgcaggggcc

SEQ ID NO: 434 - RNA, 19 nt, Artificial Sequence
  Description of Artificial Sequence: siNA target
aacaccaaccgccgcccac

SEQ ID NO: 435 - RNA, 19 nt, Artificial Sequence
  Description of Artificial Sequence: siNA target
gaguuuaccuguugccgcg

SEQ ID NO: 436 - RNA, 19 nt, Artificial Sequence
  Description of Artificial Sequence: siNA target
uuuaccuguugccgcgcag

SEQ ID NO: 437 - RNA, 19 nt, Artificial Sequence
  Description of Artificial Sequence: siNA target
ggggugggcaggauggcuc

SEQ ID NO: 438 - RNA, 19 nt, Artificial Sequence
  Description of Artificial Sequence: siNA target
gaagacuuccgagcggucg

SEQ ID NO: 439 - RNA, 19 nt, Artificial Sequence
  Description of Artificial Sequence: siNA target
accuguugccgcgcagggg

SEQ ID NO: 440 - RNA, 19 nt, Artificial Sequence
  Description of Artificial Sequence: siNA target
uaccuguugccgcgcaggg

SEQ ID NO: 441 - RNA, 19 nt, Artificial Sequence
  Description of Artificial Sequence: siNA target
uaccucuucaacugggcag

SEQ ID NO: 442 - RNA, 19 nt, Artificial Sequence
  Description of Artificial Sequence: siNA target
cgugaacuaugcaacaggg

SEQ ID NO: 443 - RNA, 19 nt, Artificial Sequence
  Description of Artificial Sequence: siNA target
acaccaaccgccgcccaca

SEQ ID NO: 444 - RNA, 19 nt, Artificial Sequence
  Description of Artificial Sequence: siNA target
cccgggcgguggucagauc

SEQ ID NO: 445 - RNA, 19 nt, Artificial Sequence
  Description of Artificial Sequence: siNA target
accucuucaacugggcagu

SEQ ID NO: 446 - RNA, 19 nt, Artificial Sequence
  Description of Artificial Sequence: siNA target
cuucgccgaccucaugggg

SEQ ID NO: 447 - RNA, 19 nt, Artificial Sequence
  Description of Artificial Sequence: siNA target
ccuguugccgcgcaggggc

SEQ ID NO: 448 - RNA, 19 nt, Artificial Sequence
  Description of Artificial Sequence: siNA target
ccaaccgccgcccacagga

SEQ ID NO: 449 - RNA, 19 nt, Artificial Sequence
  Description of Artificial Sequence: siNA target
accaaccgccgcccacagg

SEQ ID NO: 450 - RNA, 19 nt, Artificial Sequence
  Description of Artificial Sequence: siNA target
uggaguuuaccuguugccg

SEQ ID NO: 451 - RNA, 19 nt, Artificial Sequence
  Description of Artificial Sequence: siNA target
caccaaccgccgcccacag

SEQ ID NO: 452 - RNA, 19 nt, Artificial Sequence
  Description of Artificial Sequence: siNA target
caaacguaacaccaaccgc

SEQ ID NO: 453 - RNA, 19 nt, Artificial Sequence
  Description of Artificial Sequence: siNA target
caagcggagacggcuggag

SEQ ID NO: 454 - RNA, 19 nt, Artificial Sequence
  Description of Artificial Sequence: siNA target
acggaggcuaugacuaggu

SEQ ID NO: 455 - RNA, 19 nt, Artificial Sequence
  Description of Artificial Sequence: siNA target
uaacaccaaccgccgccca

SEQ ID NO: 456 - RNA, 19 nt, Artificial Sequence
  Description of Artificial Sequence: siNA target
aucguugguggaguuuacc

SEQ ID NO: 457 - RNA, 19 nt, Artificial Sequence
  Description of Artificial Sequence: siNA target
gggagacauauaucacagc

SEQ ID NO: 458 - RNA, 19 nt, Artificial Sequence
  Description of Artificial Sequence: siNA target
aaccucguggaaggcgaca

SEQ ID NO: 459 - RNA, 19 nt, Artificial Sequence
  Description of Artificial Sequence: siNA target
gggggagacauauaucaca

SEQ ID NO: 460 - RNA, 19 nt, Artificial Sequence
  Description of Artificial Sequence: siNA target
aacguaacaccaaccgccg

SEQ ID NO: 461 - RNA, 19 nt, Artificial Sequence
  Description of Artificial Sequence: siNA target
aaacguaacaccaaccgcc

SEQ ID NO: 462 - RNA, 19 nt, Artificial Sequence
  Description of Artificial Sequence: siNA target
ggggagacauauaucacag

SEQ ID NO: 463 - RNA, 19 nt, Artificial Sequence
  Description of Artificial Sequence: siNA target
gagaugaaggcgaaggcgu

SEQ ID NO: 464 - RNA, 19 nt, Artificial Sequence
  Description of Artificial Sequence: siNA target
aagcggagacggcuggagc

SEQ ID NO: 465 - RNA, 19 nt, Artificial Sequence
  Description of Artificial Sequence: siNA target
guacccuuggccccucuau

SEQ ID NO: 466 - RNA, 19 nt, Artificial Sequence
  Description of Artificial Sequence: siNA target
ccuccaggacccccccucc

SEQ ID NO: 467 - RNA, 19 nt, Artificial Sequence
  Description of Artificial Sequence: siNA target
cuccaggacccccccuccc

SEQ ID NO: 468 - RNA, 19 nt, Artificial Sequence
  Description of Artificial Sequence: siNA target
uacccuuggccccucuaug

SEQ ID NO: 469 - RNA, 19 nt, Artificial Sequence
  Description of Artificial Sequence: siNA target
caaccucguggaaggcgac

SEQ ID NO: 470 - RNA, 19 nt, Artificial Sequence
  Description of Artificial Sequence: siNA target
cggaggcuaugacuaggua

SEQ ID NO: 471 - RNA, 19 nt, Artificial Sequence
  Description of Artificial Sequence: siNA target
ggagaugaaggcgaaggcg

SEQ ID NO: 472 - RNA, 19 nt, Artificial Sequence
  Description of Artificial Sequence: siNA target
agaugaaggcgaaggcguc

SEQ ID NO: 473 - RNA, 19 nt, Artificial Sequence
  Description of Artificial Sequence: siNA target
guaacaccaaccgccgccc

SEQ ID NO: 474 - RNA, 19 nt, Artificial Sequence
  Description of Artificial Sequence: siNA target
cguaacaccaaccgccgcc

SEQ ID NO: 475 - RNA, 19 nt, Artificial Sequence
  Description of Artificial Sequence: siNA target
acguaacaccaaccgccgc

SEQ ID NO: 476 - RNA, 19 nt, Artificial Sequence
  Description of Artificial Sequence: siNA target
cacggaggcuaugacuagg

SEQ ID NO: 477 - RNA, 19 nt, Artificial Sequence
  Description of Artificial Sequence: siNA target
guugguggaguuuaccugu

SEQ ID NO: 478 - RNA, 19 nt, Artificial Sequence
  Description of Artificial Sequence: siNA target
cguugguggaguuuaccug

SEQ ID NO: 479 - RNA, 19 nt, Artificial Sequence
  Description of Artificial Sequence: siNA target
acccuuggccccucuaugg

SEQ ID NO: 480 - RNA, 19 nt, Artificial Sequence
  Description of Artificial Sequence: siNA target
uugguggaguuuaccuguu

SEQ ID NO: 481 - RNA, 19 nt, Artificial Sequence
  Description of Artificial Sequence: siNA target
ugguggaguuuaccuguug

SEQ ID NO: 482 - RNA, 19 nt, Artificial Sequence
  Description of Artificial Sequence: siNA target
ucguugguggaguuuaccu

SEQ ID NO: 483 - RNA, 19 nt, Artificial Sequence
  Description of Artificial Sequence: siNA target
cggguacccuuggccccuc

SEQ ID NO: 484 - RNA, 19 nt, Artificial Sequence
  Description of Artificial Sequence: siNA target
ggcucagcccggguacccu

SEQ ID NO: 485 - RNA, 19 nt, Artificial Sequence
  Description of Artificial Sequence: siNA target
gaucacuccccugugagga

SEQ ID NO: 486 - RNA, 19 nt, Artificial Sequence
  Description of Artificial Sequence: siNA target
gguggucagaucguuggug

SEQ ID NO: 487 - RNA, 19 nt, Artificial Sequence
  Description of Artificial Sequence: siNA target
gaugaaggcgaaggcgucc

SEQ ID NO: 488 - RNA, 19 nt, Artificial Sequence
  Description of Artificial Sequence: siNA target
aggauggcuccugucaccc

SEQ ID NO: 489 - RNA, 19 nt, Artificial Sequence
  Description of Artificial Sequence: siNA target
cucagcccggguacccuug

SEQ ID NO: 490 - RNA, 19 nt, Artificial Sequence
  Description of Artificial Sequence: siNA target
ucagcccggguacccuugg

SEQ ID NO: 491 - RNA, 19 nt, Artificial Sequence
  Description of Artificial Sequence: siNA target
augaaggcgaaggcgucca

SEQ ID NO: 492 - RNA, 19 nt, Artificial Sequence
  Description of Artificial Sequence: siNA target
cgggggagacauauaucac

SEQ ID NO: 493 - RNA, 19 nt, Artificial Sequence
  Description of Artificial Sequence: siNA target
caggauggcuccugucacc

SEQ ID NO: 494 - RNA, 19 nt, Artificial Sequence
  Description of Artificial Sequence: siNA target
ugaaggcgaaggcguccac

SEQ ID NO: 495 - RNA, 19 nt, Artificial Sequence
  Description of Artificial Sequence: siNA target
uggucagaucguuggugga

SEQ ID NO: 496 - RNA, 19 nt, Artificial Sequence
  Description of Artificial Sequence: siNA target
gcucagcccggguacccuu

SEQ ID NO: 497 - RNA, 19 nt, Artificial Sequence
  Description of Artificial Sequence: siNA target
guggucagaucguuggugg

SEQ ID NO: 498 - RNA, 19 nt, Artificial Sequence
  Description of Artificial Sequence: siNA target
cagccuccaggaccccccc

SEQ ID NO: 499 - RNA, 19 nt, Artificial Sequence
  Description of Artificial Sequence: siNA target
ggcgguggucagaucguug

SEQ ID NO: 500 - RNA, 19 nt, Artificial Sequence
  Description of Artificial Sequence: siNA target
gccuccaggacccccccuc

SEQ ID NO: 501 - RNA, 19 nt, Artificial Sequence
  Description of Artificial Sequence: siNA target
aaccggcugauagcguucg

SEQ ID NO: 502 - RNA, 19 nt, Artificial Sequence
  Description of Artificial Sequence: siNA target
agccuccaggacccccccu

SEQ ID NO: 503 - RNA, 19 nt, Artificial Sequence
  Description of Artificial Sequence: siNA target
cggcuucgccgaccucaug

SEQ ID NO: 504 - RNA, 19 nt, Artificial Sequence
  Description of Artificial Sequence: siNA target
gcggagacggcuggagcgc

SEQ ID NO: 505 - RNA, 19 nt, Artificial Sequence
  Description of Artificial Sequence: siNA target
ucaugggguacauuccgcu

SEQ ID NO: 506 - RNA, 19 nt, Artificial Sequence
  Description of Artificial Sequence: siNA target
gaaccggcugauagcguuc

SEQ ID NO: 507 - RNA, 19 nt, Artificial Sequence
  Description of Artificial Sequence: siNA target
gcgguggucagaucguugg

SEQ ID NO: 508 - RNA, 19 nt, Artificial Sequence
  Description of Artificial Sequence: siNA target
ggcaggauggcuccuguca

SEQ ID NO: 509 - RNA, 19 nt, Artificial Sequence
  Description of Artificial Sequence: siNA target
gcaggauggcuccugucac

SEQ ID NO: 510 - RNA, 19 nt, Artificial Sequence
  Description of Artificial Sequence: siNA target
auuuggguaaggucaucga

SEQ ID NO: 511 - RNA, 19 nt, Artificial Sequence
  Description of Artificial Sequence: siNA target
accggcugauagcguucgc

SEQ ID NO: 512 - RNA, 19 nt, Artificial Sequence
  Description of Artificial Sequence: siNA target
cggagacggcuggagcgcg

SEQ ID NO: 513 - RNA, 19 nt, Artificial Sequence
  Description of Artificial Sequence: siNA target
gcggcuucgccgaccucau

SEQ ID NO: 514 - RNA, 19 nt, Artificial Sequence
  Description of Artificial Sequence: siNA target
aauuuggguaaggucaucg

SEQ ID NO: 515 - RNA, 19 nt, Artificial Sequence
  Description of Artificial Sequence: siNA target
gggcgguggucagaucguu

SEQ ID NO: 516 - RNA, 19 nt, Artificial Sequence
  Description of Artificial Sequence: siNA target
caaccgccgcccacaggac

SEQ ID NO: 517 - RNA, 19 nt, Artificial Sequence
  Description of Artificial Sequence: siNA target
ugcggcuucgccgaccuca

SEQ ID NO: 518 - RNA, 19 nt, Artificial Sequence
  Description of Artificial Sequence: siNA target
cgguggucagaucguuggu

SEQ ID NO: 519 - RNA, 19 nt, Artificial Sequence
  Description of Artificial Sequence: siNA target
uugggugugcgcgcgacua

SEQ ID NO: 520 - RNA, 19 nt, Artificial Sequence
  Description of Artificial Sequence: siNA target
gugugcgcgcgacuaggaa

SEQ ID NO: 521 - RNA, 19 nt, Artificial Sequence
  Description of Artificial Sequence: siNA target
gauggcuccugucaccccg

SEQ ID NO: 522 - RNA, 19 nt, Artificial Sequence
  Description of Artificial Sequence: siNA target
ggauggcuccugucacccc

SEQ ID NO: 523 - RNA, 19 nt, Artificial Sequence
  Description of Artificial Sequence: siNA target
ugugcgcgcgacuaggaag

SEQ ID NO: 524 - RNA, 19 nt, Artificial Sequence
  Description of Artificial Sequence: siNA target
ugggugugcgcgcgacuag

SEQ ID NO: 525 - RNA, 19 nt, Artificial Sequence
  Description of Artificial Sequence: siNA target
ggugugcgcgcgacuagga

SEQ ID NO: 526 - RNA, 19 nt, Artificial Sequence
  Description of Artificial Sequence: siNA target
gggugugcgcgcgacuagg

SEQ ID NO: 527 - RNA, 19 nt, Artificial Sequence
  Description of Artificial Sequence: siNA target
ccccggcguaggucgcgua

SEQ ID NO: 528 - RNA, 19 nt, Artificial Sequence
  Description of Artificial Sequence: siNA target
gaaggcgacaaccuauccc

SEQ ID NO: 529 - RNA, 19 nt, Artificial Sequence
  Description of Artificial Sequence: siNA target
cccggcguaggucgcguaa

SEQ ID NO: 530 - RNA, 19 nt, Artificial Sequence
  Description of Artificial Sequence: siNA target
agcggagacggcuggagcg

SEQ ID NO: 531 - RNA, 19 nt, Artificial Sequence
  Description of Artificial Sequence: siNA target
cccccggcguaggucgcgu

SEQ ID NO: 532 - RNA, 19 nt, Artificial Sequence
  Description of Artificial Sequence: siNA target
aggcgaaggcguccacagu

SEQ ID NO: 533 - RNA, 19 nt, Artificial Sequence
  Description of Artificial Sequence: siNA target
aaggcgaaggcguccacag

SEQ ID NO: 534 - RNA, 19 nt, Artificial Sequence
  Description of Artificial Sequence: siNA target
guugggugugcgcgcgacu

SEQ ID NO: 535 - RNA, 19 nt, Artificial Sequence
  Description of Artificial Sequence: siNA target
cucaugggguacauuccgc

SEQ ID NO: 536 - RNA, 19 nt, Artificial Sequence
  Description of Artificial Sequence: siNA target
ggaaggcgacaaccuaucc

SEQ ID NO: 537 - RNA, 19 nt, Artificial Sequence
  Description of Artificial Sequence: siNA target
gcaaguuccuugccgacgg

SEQ ID NO: 538 - RNA, 19 nt, Artificial Sequence
  Description of Artificial Sequence: siNA target
ugcagccuccaggaccccc

SEQ ID NO: 539 - RNA, 19 nt, Artificial Sequence
  Description of Artificial Sequence: siNA target
ggacugcacgaugcucgug

SEQ ID NO: 540 - RNA, 19 nt, Artificial Sequence
  Description of Artificial Sequence: siNA target
gaaggcgaaggcguccaca

SEQ ID NO: 541 - RNA, 19 nt, Artificial Sequence
  Description of Artificial Sequence: siNA target
gcaaccucguggaaggcga

SEQ ID NO: 542 - RNA, 19 nt, Artificial Sequence
  Description of Artificial Sequence: siNA target
gacgcgggcugugcuuggu

SEQ ID NO: 543 - RNA, 19 nt, Artificial Sequence
  Description of Artificial Sequence: siNA target
acgcgggcugugcuuggua

SEQ ID NO: 544 - RNA, 19 nt, Artificial Sequence
  Description of Artificial Sequence: siNA target
gugcagccuccaggacccc

SEQ ID NO: 545 - RNA, 19 nt, Artificial Sequence
  Description of Artificial Sequence: siNA target
gcagccuccaggacccccc

SEQ ID NO: 546 - RNA, 19 nt, Artificial Sequence
  Description of Artificial Sequence: siNA target
cgcaaccucguggaaggcg

SEQ ID NO: 547 - RNA, 19 nt, Artificial Sequence
  Description of Artificial Sequence: siNA target
ugucgugcagccuccagga

SEQ ID NO: 548 - RNA, 19 nt, Artificial Sequence
  Description of Artificial Sequence: siNA target
auggcuugggauaugauga

SEQ ID NO: 549 - RNA, 19 nt, Artificial Sequence
  Description of Artificial Sequence: siNA target
cuugggauaugaugaugaa

SEQ ID NO: 550 - RNA, 19 nt, Artificial Sequence
  Description of Artificial Sequence: siNA target
cccuuggccccucuauggc

SEQ ID NO: 551 - RNA, 19 nt, Artificial Sequence
  Description of Artificial Sequence: siNA target
uggcuugggauaugaugau

SEQ ID NO: 552 - RNA, 19 nt, Artificial Sequence
  Description of Artificial Sequence: siNA target
cugugcaguggaugaaccg

SEQ ID NO: 553 - RNA, 19 nt, Artificial Sequence
  Description of Artificial Sequence: siNA target
augacgcgggcugugcuug

SEQ ID NO: 554 - RNA, 19 nt, Artificial Sequence
  Description of Artificial Sequence: siNA target
gcuugggauaugaugauga

SEQ ID NO: 555 - RNA, 19 nt, Artificial Sequence
  Description of Artificial Sequence: siNA target
uaugacgcgggcugugcuu

SEQ ID NO: 556 - RNA, 19 nt, Artificial Sequence
  Description of Artificial Sequence: siNA target
ugacgcgggcugugcuugg

SEQ ID NO: 557 - RNA, 19 nt, Artificial Sequence
  Description of Artificial Sequence: siNA target
ggcuugggauaugaugaug

SEQ ID NO: 558 - RNA, 19 nt, Artificial Sequence
  Description of Artificial Sequence: siNA target
ugugcaguggaugaaccgg

SEQ ID NO: 559 - RNA, 19 nt, Artificial Sequence
  Description of Artificial Sequence: siNA target
gcugugcaguggaugaacc

SEQ ID NO: 560 - RNA, 19 nt, Artificial Sequence
  Description of Artificial Sequence: siNA target
cucuucaacugggcaguaa

SEQ ID NO: 561 - RNA, 19 nt, Artificial Sequence
  Description of Artificial Sequence: siNA target
ccucguggaaggcgacaac

SEQ ID NO: 562 - RNA, 19 nt, Artificial Sequence
  Description of Artificial Sequence: siNA target
ugugucacccagacagucg

SEQ ID NO: 563 - RNA, 19 nt, Artificial Sequence
  Description of Artificial Sequence: siNA target
ggcgugaacuaugcaacag

SEQ ID NO: 564 - RNA, 19 nt, Artificial Sequence
  Description of Artificial Sequence: siNA target
cggcgugaacuaugcaaca

SEQ ID NO: 565 - RNA, 19 nt, Artificial Sequence
  Description of Artificial Sequence: siNA target
gugucacccagacagucga

SEQ ID NO: 566 - RNA, 19 nt, Artificial Sequence
  Description of Artificial Sequence: siNA target
ccucuucaacugggcagua

SEQ ID NO: 567 - RNA, 19 nt, Artificial Sequence
  Description of Artificial Sequence: siNA target
cguggaaggcgacaaccua

SEQ ID NO: 568 - RNA, 19 nt, Artificial Sequence
  Description of Artificial Sequence: siNA target
ucguggaaggcgacaaccu

SEQ ID NO: 569 - RNA, 19 nt, Artificial Sequence
  Description of Artificial Sequence: siNA target
cggccuaguuggggcccca

SEQ ID NO: 570 - RNA, 19 nt, Artificial Sequence
  Description of Artificial Sequence: siNA target
cgacuaggaagacuuccga

SEQ ID NO: 571 - RNA, 19 nt, Artificial Sequence
  Description of Artificial Sequence: siNA target
uuuggguaaggucaucgau

SEQ ID NO: 572 - RNA, 19 nt, Artificial Sequence
  Description of Artificial Sequence: siNA target
guggaaggcgacaaccuau

SEQ ID NO: 573 - RNA, 19 nt, Artificial Sequence
  Description of Artificial Sequence: siNA target
accucguggaaggcgacaa

SEQ ID NO: 574 - RNA, 19 nt, Artificial Sequence
  Description of Artificial Sequence: siNA target
gcgacuaggaagacuuccg

SEQ ID NO: 575 - RNA, 19 nt, Artificial Sequence
  Description of Artificial Sequence: siNA target
gucgugcagccuccaggac

SEQ ID NO: 576 - RNA, 19 nt, Artificial Sequence
  Description of Artificial Sequence: siNA target
uaggaagacuuccgagcgg

SEQ ID NO: 577 - RNA, 19 nt, Artificial Sequence
  Description of Artificial Sequence: siNA target
acggcgugaacuaugcaac

SEQ ID NO: 578 - RNA, 19 nt, Artificial Sequence
  Description of Artificial Sequence: siNA target
cucguggaaggcgacaacc

SEQ ID NO: 579 - RNA, 19 nt, Artificial Sequence
  Description of Artificial Sequence: siNA target
ggucgcaaccucguggaag

SEQ ID NO: 580 - RNA, 19 nt, Artificial Sequence
  Description of Artificial Sequence: siNA target
cggucgcaaccucguggaa

SEQ ID NO: 581 - RNA, 19 nt, Artificial Sequence
  Description of Artificial Sequence: siNA target
gcgcgcgacuaggaagacu

SEQ ID NO: 582 - RNA, 19 nt, Artificial Sequence
  Description of Artificial Sequence: siNA target
gacggcgugaacuaugcaa

SEQ ID NO: 583 - RNA, 19 nt, Artificial Sequence
  Description of Artificial Sequence: siNA target
uagaucacuccccugugag

SEQ ID NO: 584 - RNA, 19 nt, Artificial Sequence
  Description of Artificial Sequence: siNA target
agcggucgcaaccucgugg

SEQ ID NO: 585 - RNA, 19 nt, Artificial Sequence
  Description of Artificial Sequence: siNA target
uggaaggcgacaaccuauc

SEQ ID NO: 586 - RNA, 19 nt, Artificial Sequence
  Description of Artificial Sequence: siNA target
cgcgcgacuaggaagacuu

SEQ ID NO: 587 - RNA, 19 nt, Artificial Sequence
  Description of Artificial Sequence: siNA target
cuaggaagacuuccgagcg

SEQ ID NO: 588 - RNA, 19 nt, Artificial Sequence
  Description of Artificial Sequence: siNA target
gugcgcgcgacuaggaaga

SEQ ID NO: 589 - RNA, 19 nt, Artificial Sequence
  Description of Artificial Sequence: siNA target
agaucacuccccugugagg

SEQ ID NO: 590 - RNA, 19 nt, Artificial Sequence
  Description of Artificial Sequence: siNA target
ugcgcgcgacuaggaagac

SEQ ID NO: 591 - RNA, 19 nt, Artificial Sequence
  Description of Artificial Sequence: siNA target
auagaucacuccccuguga

SEQ ID NO: 592 - RNA, 19 nt, Artificial Sequence
  Description of Artificial Sequence: siNA target
gagcggucgcaaccucgug

SEQ ID NO: 593 - RNA, 19 nt, Artificial Sequence
  Description of Artificial Sequence: siNA target
cacgaacgacugcuccaac

SEQ ID NO: 594 - RNA, 19 nt, Artificial Sequence
  Description of Artificial Sequence: siNA target
ggcaaguuccuugccgacg

SEQ ID NO: 595 - RNA, 19 nt, Artificial Sequence
  Description of Artificial Sequence: siNA target
ucgugcagccuccaggacc

SEQ ID NO: 596 - RNA, 19 nt, Artificial Sequence
  Description of Artificial Sequence: siNA target
gucacgaacgacugcucca

SEQ ID NO: 597 - RNA, 19 nt, Artificial Sequence
  Description of Artificial Sequence: siNA target
gcggucgcaaccucgugga

SEQ ID NO: 598 - RNA, 19 nt, Artificial Sequence
  Description of Artificial Sequence: siNA target
gcgcgacuaggaagacuuc

SEQ ID NO: 599 - RNA, 19 nt, Artificial Sequence
  Description of Artificial Sequence: siNA target
gcuaugacgcgggcugugc

SEQ ID NO: 600 - RNA, 19 nt, Artificial Sequence
  Description of Artificial Sequence: siNA target
ucacgaacgacugcuccaa

SEQ ID NO: 601 - RNA, 19 nt, Artificial Sequence
  Description of Artificial Sequence: siNA target
ucgcaaccucguggaaggc

SEQ ID NO: 602 - RNA, 19 nt, Artificial Sequence
  Description of Artificial Sequence: siNA target
cgugcagccuccaggaccc

SEQ ID NO: 603 - RNA, 19 nt, Artificial Sequence
  Description of Artificial Sequence: siNA target
gucgcaaccucguggaagg

SEQ ID NO: 604 - RNA, 19 nt, Artificial Sequence
  Description of Artificial Sequence: siNA target
acuaggaagacuuccgagc

SEQ ID NO: 605 - RNA, 19 nt, Artificial Sequence
  Description of Artificial Sequence: siNA target
cgcgacuaggaagacuucc

SEQ ID NO: 606 - RNA, 19 nt, Artificial Sequence
  Description of Artificial Sequence: siNA target
ugggcgaagcacaugugga

SEQ ID NO: 607 - RNA, 19 nt, Artificial Sequence
  Description of Artificial Sequence: siNA target
ccuugccuacuauuccaug

SEQ ID NO: 608 - RNA, 19 nt, Artificial Sequence
  Description of Artificial Sequence: siNA target
gccucaggaaacuuggggu

SEQ ID NO: 609 - RNA, 19 nt, Artificial Sequence
  Description of Artificial Sequence: siNA target
ugcuaugacgcgggcugug

SEQ ID NO: 610 - RNA, 19 nt, Artificial Sequence
  Description of Artificial Sequence: siNA target
ucgugcucgccaccgcuac

SEQ ID NO: 611 - RNA, 19 nt, Artificial Sequence
  Description of Artificial Sequence: siNA target
ugccucaggaaacuugggg

SEQ ID NO: 612 - RNA, 19 nt, Artificial Sequence
  Description of Artificial Sequence: siNA target
ugucucgugcccgaccccg

SEQ ID NO: 613 - RNA, 19 nt, Artificial Sequence
  Description of Artificial Sequence: siNA target
uguggcggcaggagauggg

SEQ ID NO: 614 - RNA, 19 nt, Artificial Sequence
  Description of Artificial Sequence: siNA target
gucgugcucgccaccgcua

SEQ ID NO: 615 - RNA, 19 nt, Artificial Sequence
  Description of Artificial Sequence: siNA target
gauuuccacuacgugacgg

SEQ ID NO: 616 - RNA, 19 nt, Artificial Sequence
  Description of Artificial Sequence: siNA target
gggccuugccuacuauucc

SEQ ID NO: 617 - RNA, 19 nt, Artificial Sequence
  Description of Artificial Sequence: siNA target
gccuugccuacuauuccau

SEQ ID NO: 618 - RNA, 19 nt, Artificial Sequence
  Description of Artificial Sequence: siNA target
gacuaggaagacuuccgag

SEQ ID NO: 619 - RNA, 19 nt, Artificial Sequence
  Description of Artificial Sequence: siNA target
gcgggggagacauauauca

SEQ ID NO: 620 - RNA, 19 nt, Artificial Sequence
  Description of Artificial Sequence: siNA target
cgagcggucgcaaccucgu

SEQ ID NO: 621 - RNA, 19 nt, Artificial Sequence
  Description of Artificial Sequence: siNA target
ggccuugccuacuauucca

SEQ ID NO: 622 - RNA, 19 nt, Artificial Sequence
  Description of Artificial Sequence: siNA target
auuuccacuacgugacggg

SEQ ID NO: 623 - RNA, 19 nt, Artificial Sequence
  Description of Artificial Sequence: siNA target
ggacgucaaguucccgggc

SEQ ID NO: 624 - RNA, 19 nt, Artificial Sequence
  Description of Artificial Sequence: siNA target
gagugcuaugacgcgggcu

SEQ ID NO: 625 - RNA, 19 nt, Artificial Sequence
  Description of Artificial Sequence: siNA target
gacgucaaguucccgggcg

SEQ ID NO: 626 - RNA, 19 nt, Artificial Sequence
  Description of Artificial Sequence: siNA target
ucagcgacgggucuugguc

SEQ ID NO: 627 - RNA, 19 nt, Artificial Sequence
  Description of Artificial Sequence: siNA target
ucaaguucccgggcggugg

SEQ ID NO: 628 - RNA, 19 nt, Artificial Sequence
  Description of Artificial Sequence: siNA target
ucaaggagaugaaggcgaa

SEQ ID NO: 629 - RNA, 19 nt, Artificial Sequence
  Description of Artificial Sequence: siNA target
ccuauccccaaggcucgcc

SEQ ID NO: 630 - RNA, 19 nt, Artificial Sequence
  Description of Artificial Sequence: siNA target
cuugaccuaccucagauca

SEQ ID NO: 631 - RNA, 19 nt, Artificial Sequence
  Description of Artificial Sequence: siNA target
uuuccacuacgugacgggc

SEQ ID NO: 632 - RNA, 19 nt, Artificial Sequence
  Description of Artificial Sequence: siNA target
agugcuaugacgcgggcug

SEQ ID NO: 633 - RNA, 19 nt, Artificial Sequence
  Description of Artificial Sequence: siNA target
acgucaaguucccgggcgg

SEQ ID NO: 634 - RNA, 19 nt, Artificial Sequence
  Description of Artificial Sequence: siNA target
ucuggagacaucgggccag

SEQ ID NO: 635 - RNA, 19 nt, Artificial Sequence
  Description of Artificial Sequence: siNA target
gggcgaagcacauguggaa

SEQ ID NO: 636 - RNA, 19 nt, Artificial Sequence
  Description of Artificial Sequence: siNA target
uugaccuaccucagaucau

SEQ ID NO: 637 - RNA, 19 nt, Artificial Sequence
  Description of Artificial Sequence: siNA target
ccaagcggagacggcugga

SEQ ID NO: 638 - RNA, 19 nt, Artificial Sequence
  Description of Artificial Sequence: siNA target
accaagcggagacggcugg

SEQ ID NO: 639 - RNA, 19 nt, Artificial Sequence
  Description of Artificial Sequence: siNA target
ggguggcuucaugccucag

SEQ ID NO: 640 - RNA, 19 nt, Artificial Sequence
  Description of Artificial Sequence: siNA target
gucaaguucccgggcggug

SEQ ID NO: 641 - RNA, 19 nt, Artificial Sequence
  Description of Artificial Sequence: siNA target
cucaaggagaugaaggcga

SEQ ID NO: 642 - RNA, 19 nt, Artificial Sequence
  Description of Artificial Sequence: siNA target
gaccaagcggagacggcug

SEQ ID NO: 643 - RNA, 19 nt, Artificial Sequence
  Description of Artificial Sequence: siNA target
uccaggucgggcucaacca

SEQ ID NO: 644 - RNA, 19 nt, Artificial Sequence
  Description of Artificial Sequence: siNA target
cucuuucucuaucuuccuc

SEQ ID NO: 645 - RNA, 19 nt, Artificial Sequence
  Description of Artificial Sequence: siNA target
gucuggagacaucgggcca

SEQ ID NO: 646 - RNA, 19 nt, Artificial Sequence
  Description of Artificial Sequence: siNA target
guugugacuuggcccccga

SEQ ID NO: 647 - RNA, 19 nt, Artificial Sequence
  Description of Artificial Sequence: siNA target
agaccuggcuccaguccaa

SEQ ID NO: 648 - RNA, 19 nt, Artificial Sequence
  Description of Artificial Sequence: siNA target
cuugccuacuauuccaugg

SEQ ID NO: 649 - RNA, 19 nt, Artificial Sequence
  Description of Artificial Sequence: siNA target
cccgguugcucuuucucua

SEQ ID NO: 650 - RNA, 19 nt, Artificial Sequence
  Description of Artificial Sequence: siNA target
cuuucucuaucuuccucuu

SEQ ID NO: 651 - RNA, 19 nt, Artificial Sequence
  Description of Artificial Sequence: siNA target
aggguggcuucaugccuca

SEQ ID NO: 652 - RNA, 19 nt, Artificial Sequence
  Description of Artificial Sequence: siNA target
aagaccuggcuccagucca

SEQ ID NO: 653 - RNA, 19 nt, Artificial Sequence
  Description of Artificial Sequence: siNA target
ccgguugcucuuucucuau

SEQ ID NO: 654 - RNA, 19 nt, Artificial Sequence
  Description of Artificial Sequence: siNA target
cgguugcucuuucucuauc

SEQ ID NO: 655 - RNA, 19 nt, Artificial Sequence
  Description of Artificial Sequence: siNA target
ugggggauuuccacuacgu

SEQ ID NO: 656 - RNA, 19 nt, Artificial Sequence
  Description of Artificial Sequence: siNA target
augucacgaacgacugcuc

SEQ ID NO: 657 - RNA, 19 nt, Artificial Sequence
  Description of Artificial Sequence: siNA target
ggccuaguuggggccccac

SEQ ID NO: 658 - RNA, 19 nt, Artificial Sequence
  Description of Artificial Sequence: siNA target
uggaccaagcggagacggc

SEQ ID NO: 659 - RNA, 19 nt, Artificial Sequence
  Description of Artificial Sequence: siNA target
uuccaggucgggcucaacc

SEQ ID NO: 660 - RNA, 19 nt, Artificial Sequence
  Description of Artificial Sequence: siNA target
agcgggucgaguuccuggu

SEQ ID NO: 661 - RNA, 19 nt, Artificial Sequence
  Description of Artificial Sequence: siNA target
caaggagaugaaggcgaag

SEQ ID NO: 662 - RNA, 19 nt, Artificial Sequence
  Description of Artificial Sequence: siNA target
caugucacgaacgacugcu

SEQ ID NO: 663 - RNA, 19 nt, Artificial Sequence
  Description of Artificial Sequence: siNA target
cagcgggucgaguuccugg

SEQ ID NO: 664 - RNA, 19 nt, Artificial Sequence
  Description of Artificial Sequence: siNA target
uuccacuacgugacgggca

SEQ ID NO: 665 - RNA, 19 nt, Artificial Sequence
  Description of Artificial Sequence: siNA target
uaggguggcuucaugccuc

SEQ ID NO: 666 - RNA, 19 nt, Artificial Sequence
  Description of Artificial Sequence: siNA target
uccaggacugcacgaugcu

SEQ ID NO: 667 - RNA, 19 nt, Artificial Sequence
  Description of Artificial Sequence: siNA target
uccacuacgugacgggcau

SEQ ID NO: 668 - RNA, 19 nt, Artificial Sequence
  Description of Artificial Sequence: siNA target
aauaggguggcuucaugcc

SEQ ID NO: 669 - RNA, 19 nt, Artificial Sequence
  Description of Artificial Sequence: siNA target
gucuucacggaggcuauga

SEQ ID NO: 670 - RNA, 19 nt, Artificial Sequence
  Description of Artificial Sequence: siNA target
auaggguggcuucaugccu

SEQ ID NO: 671 - RNA, 19 nt, Artificial Sequence
  Description of Artificial Sequence: siNA target
ucuucacggaggcuaugac

SEQ ID NO: 672 - RNA, 19 nt, Artificial Sequence
  Description of Artificial Sequence: siNA target
augccucaggaaacuuggg

SEQ ID NO: 673 - RNA, 19 nt, Artificial Sequence
  Description of Artificial Sequence: siNA target
accgggacgugcucaagga

SEQ ID NO: 674 - RNA, 19 nt, Artificial Sequence
  Description of Artificial Sequence: siNA target
ggggcugugcaguggauga

SEQ ID NO: 675 - RNA, 19 nt, Artificial Sequence
  Description of Artificial Sequence: siNA target
aagcuccaggacugcacga

SEQ ID NO: 676 - RNA, 19 nt, Artificial Sequence
  Description of Artificial Sequence: siNA target
gcuccaggacugcacgaug

SEQ ID NO: 677 - RNA, 19 nt, Artificial Sequence
  Description of Artificial Sequence: siNA target
uaccgggacgugcucaagg

SEQ ID NO: 678 - RNA, 19 nt, Artificial Sequence
  Description of Artificial Sequence: siNA target
gggcugugcaguggaugaa

SEQ ID NO: 679 - RNA, 19 nt, Artificial Sequence
  Description of Artificial Sequence: siNA target
cgucaaguucccgggcggu

SEQ ID NO: 680 - RNA, 19 nt, Artificial Sequence
  Description of Artificial Sequence: siNA target
ucaauaggguggcuucaug

SEQ ID NO: 681 - RNA, 19 nt, Artificial Sequence
  Description of Artificial Sequence: siNA target
agucuucacggaggcuaug

SEQ ID NO: 682 - RNA, 19 nt, Artificial Sequence
  Description of Artificial Sequence: siNA target
ggaccaagcggagacggcu

SEQ ID NO: 683 - RNA, 19 nt, Artificial Sequence
  Description of Artificial Sequence: siNA target
ggcuccaguccaagcuccu

SEQ ID NO: 684 - RNA, 19 nt, Artificial Sequence
  Description of Artificial Sequence: siNA target
ggcugugcaguggaugaac

SEQ ID NO: 685 - RNA, 19 nt, Artificial Sequence
  Description of Artificial Sequence: siNA target
cuccaggacugcacgaugc

SEQ ID NO: 686 - RNA, 19 nt, Artificial Sequence
  Description of Artificial Sequence: siNA target
gagucuucacggaggcuau

SEQ ID NO: 687 - RNA, 19 nt, Artificial Sequence
  Description of Artificial Sequence: siNA target
uggcuccaguccaagcucc

SEQ ID NO: 688 - RNA, 19 nt, Artificial Sequence
  Description of Artificial Sequence: siNA target
ggggauuuccacuacguga

SEQ ID NO: 689 - RNA, 19 nt, Artificial Sequence
  Description of Artificial Sequence: siNA target
caugccucaggaaacuugg

SEQ ID NO: 690 - RNA, 19 nt, Artificial Sequence
  Description of Artificial Sequence: siNA target
aucaauaggguggcuucau

SEQ ID NO: 691 - RNA, 19 nt, Artificial Sequence
  Description of Artificial Sequence: siNA target
gcgggccuugccuacuauu

SEQ ID NO: 692 - RNA, 19 nt, Artificial Sequence
  Description of Artificial Sequence: siNA target
ccgggacgugcucaaggag

SEQ ID NO: 693 - RNA, 19 nt, Artificial Sequence
  Description of Artificial Sequence: siNA target
ccaugguggggaacugggc

SEQ ID NO: 694 - RNA, 19 nt, Artificial Sequence
  Description of Artificial Sequence: siNA target
caauaggguggcuucaugc

SEQ ID NO: 695 - RNA, 19 nt, Artificial Sequence
  Description of Artificial Sequence: siNA target
agcuccaggacugcacgau

SEQ ID NO: 696 - RNA, 19 nt, Artificial Sequence
  Description of Artificial Sequence: siNA target
cgggccuugccuacuauuc

SEQ ID NO: 697 - RNA, 19 nt, Artificial Sequence
  Description of Artificial Sequence: siNA antisense
cuacgagaccucccggggc

SEQ ID NO: 698 - RNA, 19 nt, Artificial Sequence
  Description of Artificial Sequence: siNA antisense
ccuaucaggcaguaccaca

SEQ ID NO: 699 - RNA, 19 nt, Artificial Sequence
  Description of Artificial Sequence: siNA antisense
cuaucaggcaguaccacaa

SEQ ID NO: 700 - RNA, 19 nt, Artificial Sequence
  Description of Artificial Sequence: siNA antisense
ucuacgagaccucccgggg

SEQ ID NO: 701 - RNA, 19 nt, Artificial Sequence
  Description of Artificial Sequence: siNA antisense
cccuaucaggcaguaccac

SEQ ID NO: 702 - RNA, 19 nt, Artificial Sequence
  Description of Artificial Sequence: siNA antisense
caagcacccuaucaggcag

SEQ ID NO: 703 - RNA, 19 nt, Artificial Sequence
  Description of Artificial Sequence: siNA antisense
aucaggcaguaccacaagg

SEQ ID NO: 704 - RNA, 19 nt, Artificial Sequence
  Description of Artificial Sequence: siNA antisense
guaccacaaggccuuucgc

SEQ ID NO: 705 - RNA, 19 nt, Artificial Sequence
  Description of Artificial Sequence: siNA antisense
agcacccuaucaggcagua

SEQ ID NO: 706 - RNA, 19 nt, Artificial Sequence
  Description of Artificial Sequence: siNA antisense
cacccuaucaggcaguacc

SEQ ID NO: 707 - RNA, 19 nt, Artificial Sequence
  Description of Artificial Sequence: siNA antisense
gcaguaccacaaggccuuu

SEQ ID NO: 708 - RNA, 19 nt, Artificial Sequence
  Description of Artificial Sequence: siNA antisense
ggcaguaccacaaggccuu

SEQ ID NO: 709 - RNA, 19 nt, Artificial Sequence
  Description of Artificial Sequence: siNA antisense
uaucaggcaguaccacaag

SEQ ID NO: 710 - RNA, 19 nt, Artificial Sequence
  Description of Artificial Sequence: siNA antisense
aggcaguaccacaaggccu

SEQ ID NO: 711 - RNA, 19 nt, Artificial Sequence
  Description of Artificial Sequence: siNA antisense
gcacccuaucaggcaguac

SEQ ID NO: 712 - RNA, 19 nt, Artificial Sequence
  Description of Artificial Sequence: siNA antisense
aagcacccuaucaggcagu

SEQ ID NO: 713 - RNA, 19 nt, Artificial Sequence
  Description of Artificial Sequence: siNA antisense
cucccggggcacucgcaag

SEQ ID NO: 714 - RNA, 19 nt, Artificial Sequence
  Description of Artificial Sequence: siNA antisense
cucgcaagcacccuaucag

SEQ ID NO: 715 - RNA, 19 nt, Artificial Sequence
  Description of Artificial Sequence: siNA antisense
ccucccggggcacucgcaa

SEQ ID NO: 716 - RNA, 19 nt, Artificial Sequence
  Description of Artificial Sequence: siNA antisense
ucgcaagcacccuaucagg

SEQ ID NO: 717 - RNA, 19 nt, Artificial Sequence
  Description of Artificial Sequence: siNA antisense
caggcaguaccacaaggcc

SEQ ID NO: 718 - RNA, 19 nt, Artificial Sequence
  Description of Artificial Sequence: siNA antisense
ucccggggcacucgcaagc

SEQ ID NO: 719 - RNA, 19 nt, Artificial Sequence
  Description of Artificial Sequence: siNA antisense
gcaagcacccuaucaggca

SEQ ID NO: 720 - RNA, 19 nt, Artificial Sequence
  Description of Artificial Sequence: siNA antisense
caguaccacaaggccuuuc

SEQ ID NO: 721 - RNA, 19 nt, Artificial Sequence
  Description of Artificial Sequence: siNA antisense
cgcaagcacccuaucaggc

SEQ ID NO: 722 - RNA, 19 nt, Artificial Sequence
  Description of Artificial Sequence: siNA antisense
aguaccacaaggccuuucg

SEQ ID NO: 723 - RNA, 19 nt, Artificial Sequence
  Description of Artificial Sequence: siNA antisense
ucaggcaguaccacaaggc

SEQ ID NO: 724 - RNA, 19 nt, Artificial Sequence
  Description of Artificial Sequence: siNA antisense
gagaccucccggggcacuc

SEQ ID NO: 725 - RNA, 19 nt, Artificial Sequence
  Description of Artificial Sequence: siNA antisense
gucuacgagaccucccggg

SEQ ID NO: 726 - RNA, 19 nt, Artificial Sequence
  Description of Artificial Sequence: siNA antisense
accucccggggcacucgca

SEQ ID NO: 727 - RNA, 19 nt, Artificial Sequence
  Description of Artificial Sequence: siNA antisense
acccuaucaggcaguacca

SEQ ID NO: 728 - RNA, 19 nt, Artificial Sequence
  Description of Artificial Sequence: siNA antisense
auuccgguguacucaccgg

SEQ ID NO: 729 - RNA, 19 nt, Artificial Sequence
  Description of Artificial Sequence: siNA antisense
gaccucccggggcacucgc

SEQ ID NO: 730 - RNA, 19 nt, Artificial Sequence
  Description of Artificial Sequence: siNA antisense
agaccucccggggcacucg

SEQ ID NO: 731 - RNA, 19 nt, Artificial Sequence
  Description of Artificial Sequence: siNA antisense
uacgagaccucccggggca

SEQ ID NO: 732 - RNA, 19 nt, Artificial Sequence
  Description of Artificial Sequence: siNA antisense
acgagaccucccggggcac

SEQ ID NO: 733 - RNA, 19 nt, Artificial Sequence
  Description of Artificial Sequence: siNA antisense
cgagaccucccggggcacu

SEQ ID NO: 734 - RNA, 19 nt, Artificial Sequence
  Description of Artificial Sequence: siNA antisense
ggucuacgagaccucccgg

SEQ ID NO: 735 - RNA, 19 nt, Artificial Sequence
  Description of Artificial Sequence: siNA antisense
acucgcaagcacccuauca

SEQ ID NO: 736 - RNA, 19 nt, Artificial Sequence
  Description of Artificial Sequence: siNA antisense
ccggggcacucgcaagcac

SEQ ID NO: 737 - RNA, 19 nt, Artificial Sequence
  Description of Artificial Sequence: siNA antisense
gcacucgcaagcacccuau

SEQ ID NO: 738 - RNA, 19 nt, Artificial Sequence
  Description of Artificial Sequence: siNA antisense
ggggcacucgcaagcaccc

SEQ ID NO: 739 - RNA, 19 nt, Artificial Sequence
  Description of Artificial Sequence: siNA antisense
cggucuacgagaccucccg

SEQ ID NO: 740 - RNA, 19 nt, Artificial Sequence
  Description of Artificial Sequence: siNA antisense
acggucuacgagaccuccc

SEQ ID NO: 741 - RNA, 19 nt, Artificial Sequence
  Description of Artificial Sequence: siNA antisense
cacucgcaagcacccuauc

SEQ ID NO: 742 - RNA, 19 nt, Artificial Sequence
  Description of Artificial Sequence: siNA antisense
cacggucuacgagaccucc

SEQ ID NO: 743 - RNA, 19 nt, Artificial Sequence
  Description of Artificial Sequence: siNA antisense
gggcacucgcaagcacccu

SEQ ID NO: 744 - RNA, 19 nt, Artificial Sequence
  Description of Artificial Sequence: siNA antisense
cccggggcacucgcaagca

SEQ ID NO: 745 - RNA, 19 nt, Artificial Sequence
  Description of Artificial Sequence: siNA antisense
cggggcacucgcaagcacc

SEQ ID NO: 746 - RNA, 19 nt, Artificial Sequence
  Description of Artificial Sequence: siNA antisense
ggcacucgcaagcacccua

SEQ ID NO: 747 - RNA, 19 nt, Artificial Sequence
  Description of Artificial Sequence: siNA antisense
ugcacggucuacgagaccu

SEQ ID NO: 748 - RNA, 19 nt, Artificial Sequence
  Description of Artificial Sequence: siNA antisense
gcacggucuacgagaccuc

SEQ ID NO: 749 - RNA, 19 nt, Artificial Sequence
  Description of Artificial Sequence: siNA antisense
cgguguacucaccgguucc

SEQ ID NO: 750 - RNA, 19 nt, Artificial Sequence
  Description of Artificial Sequence: siNA antisense
gguguacucaccgguuccg

SEQ ID NO: 751 - RNA, 19 nt, Artificial Sequence
  Description of Artificial Sequence: siNA antisense
aauuccgguguacucaccg

SEQ ID NO: 752 - RNA, 19 nt, Artificial Sequence
  Description of Artificial Sequence: siNA antisense
guguacucaccgguuccgc

SEQ ID NO: 753 - RNA, 19 nt, Artificial Sequence
  Description of Artificial Sequence: siNA antisense
uccgguguacucaccgguu

SEQ ID NO: 754 - RNA, 19 nt, Artificial Sequence
  Description of Artificial Sequence: siNA antisense
uuccgguguacucaccggu

SEQ ID NO: 755 - RNA, 19 nt, Artificial Sequence
  Description of Artificial Sequence: siNA antisense
guacucaccgguuccgcag

SEQ ID NO: 756 - RNA, 19 nt, Artificial Sequence
  Description of Artificial Sequence: siNA antisense
acucaccgguuccgcagac

SEQ ID NO: 757 - RNA, 19 nt, Artificial Sequence
  Description of Artificial Sequence: siNA antisense
ccgguguacucaccgguuc

SEQ ID NO: 758 - RNA, 19 nt, Artificial Sequence
  Description of Artificial Sequence: siNA antisense
uguacucaccgguuccgca

SEQ ID NO: 759 - RNA, 19 nt, Artificial Sequence
  Description of Artificial Sequence: siNA antisense
uacucaccgguuccgcaga

SEQ ID NO: 760 - RNA, 19 nt, Artificial Sequence
  Description of Artificial Sequence: siNA antisense
agaccacuauggcucuccc

SEQ ID NO: 761 - RNA, 19 nt, Artificial Sequence
  Description of Artificial Sequence: siNA antisense
caccgguuccgcagaccac

SEQ ID NO: 762 - RNA, 19 nt, Artificial Sequence
  Description of Artificial Sequence: siNA antisense
cucaccgguuccgcagacc

SEQ ID NO: 763 - RNA, 19 nt, Artificial Sequence
  Description of Artificial Sequence: siNA antisense
gaccacuauggcucucccg

SEQ ID NO: 764 - RNA, 19 nt, Artificial Sequence
  Description of Artificial Sequence: siNA antisense
accacuauggcucucccgg

SEQ ID NO: 765 - RNA, 19 nt, Artificial Sequence
  Description of Artificial Sequence: siNA antisense
ucaccgguuccgcagacca

SEQ ID NO: 766 - RNA, 19 nt, Artificial Sequence
  Description of Artificial Sequence: siNA antisense
gcaauuccgguguacucac

SEQ ID NO: 767 - RNA, 19 nt, Artificial Sequence
  Description of Artificial Sequence: siNA antisense
ggcaauuccgguguacuca

SEQ ID NO: 768 - RNA, 19 nt, Artificial Sequence
  Description of Artificial Sequence: siNA antisense
caauuccgguguacucacc

SEQ ID NO: 769 - RNA, 19 nt, Artificial Sequence
  Description of Artificial Sequence: siNA antisense
ccgcagaccacuauggcuc

SEQ ID NO: 770 - RNA, 19 nt, Artificial Sequence
  Description of Artificial Sequence: siNA antisense
cgcagaccacuauggcucu

SEQ ID NO: 771 - RNA, 19 nt, Artificial Sequence
  Description of Artificial Sequence: siNA antisense
ccgguuccgcagaccacua

SEQ ID NO: 772 - RNA, 19 nt, Artificial Sequence
  Description of Artificial Sequence: siNA antisense
cgguuccgcagaccacuau

SEQ ID NO: 773 - RNA, 19 nt, Artificial Sequence
  Description of Artificial Sequence: siNA antisense
gcagaccacuauggcucuc

SEQ ID NO: 774 - RNA, 19 nt, Artificial Sequence
  Description of Artificial Sequence: siNA antisense
uuccgcagaccacuauggc

SEQ ID NO: 775 - RNA, 19 nt, Artificial Sequence
  Description of Artificial Sequence: siNA antisense
accgguuccgcagaccacu

SEQ ID NO: 776 - RNA, 19 nt, Artificial Sequence
  Description of Artificial Sequence: siNA antisense
gguuccgcagaccacuaug

SEQ ID NO: 777 - RNA, 19 nt, Artificial Sequence
  Description of Artificial Sequence: siNA antisense
uccgcagaccacuauggcu

SEQ ID NO: 778 - RNA, 19 nt, Artificial Sequence
  Description of Artificial Sequence: siNA antisense
guuccgcagaccacuaugg

SEQ ID NO: 779 - RNA, 19 nt, Artificial Sequence
  Description of Artificial Sequence: siNA antisense
auggcucucccgggagggg

SEQ ID NO: 780 - RNA, 19 nt, Artificial Sequence
  Description of Artificial Sequence: siNA antisense
cagaccacuauggcucucc

SEQ ID NO: 781 - RNA, 19 nt, Artificial Sequence
  Description of Artificial Sequence: siNA antisense
ccacuauggcucucccggg

SEQ ID NO: 782 - RNA, 19 nt, Artificial Sequence
  Description of Artificial Sequence: siNA antisense
uggcucucccgggaggggg

SEQ ID NO: 783 - RNA, 19 nt, Artificial Sequence
  Description of Artificial Sequence: siNA antisense
cacuauggcucucccggga

SEQ ID NO: 784 - RNA, 19 nt, Artificial Sequence
  Description of Artificial Sequence: siNA antisense
ggcucucccgggagggggg

SEQ ID NO: 785 - RNA, 19 nt, Artificial Sequence
  Description of Artificial Sequence: siNA antisense
uauggcucucccgggaggg

SEQ ID NO: 786 - RNA, 19 nt, Artificial Sequence
  Description of Artificial Sequence: siNA antisense
cuauggcucucccgggagg

SEQ ID NO: 787 - RNA, 19 nt, Artificial Sequence
  Description of Artificial Sequence: siNA antisense
acuauggcucucccgggag

SEQ ID NO: 788 - RNA, 19 nt, Artificial Sequence
  Description of Artificial Sequence: siNA antisense
gggccccugcgcggcaaca

SEQ ID NO: 789 - RNA, 19 nt, Artificial Sequence
  Description of Artificial Sequence: siNA antisense
gcucucccgggaggggggg

SEQ ID NO: 790 - RNA, 19 nt, Artificial Sequence
  Description of Artificial Sequence: siNA antisense
cacucauacuaacgccaug

SEQ ID NO: 791 - RNA, 19 nt, Artificial Sequence
  Description of Artificial Sequence: siNA antisense
cauacuaacgccauggcua

SEQ ID NO: 792 - RNA, 19 nt, Artificial Sequence
  Description of Artificial Sequence: siNA antisense
ucauacuaacgccauggcu

SEQ ID NO: 793 - RNA, 19 nt, Artificial Sequence
  Description of Artificial Sequence: siNA antisense
acucauacuaacgccaugg

SEQ ID NO: 794 - RNA, 19 nt, Artificial Sequence
  Description of Artificial Sequence: siNA antisense
acacucauacuaacgccau

SEQ ID NO: 795 - RNA, 19 nt, Artificial Sequence
  Description of Artificial Sequence: siNA antisense
acgccauggcuagacgcuu

SEQ ID NO: 796 - RNA, 19 nt, Artificial Sequence
  Description of Artificial Sequence: siNA antisense
acuaacgccauggcuagac

SEQ ID NO: 797 - RNA, 19 nt, Artificial Sequence
  Description of Artificial Sequence: siNA antisense
cgccauggcuagacgcuuu

SEQ ID NO: 798 - RNA, 19 nt, Artificial Sequence
  Description of Artificial Sequence: siNA antisense
uaacgccauggcuagacgc

SEQ ID NO: 799 - RNA, 19 nt, Artificial Sequence
  Description of Artificial Sequence: siNA antisense
cucauacuaacgccauggc

SEQ ID NO: 800 - RNA, 19 nt, Artificial Sequence
  Description of Artificial Sequence: siNA antisense
aacgccauggcuagacgcu

SEQ ID NO: 801 - RNA, 19 nt, Artificial Sequence
  Description of Artificial Sequence: siNA antisense
cuaacgccauggcuagacg

SEQ ID NO: 802 - RNA, 19 nt, Artificial Sequence
  Description of Artificial Sequence: siNA antisense
uacuaacgccauggcuaga

SEQ ID NO: 803 - RNA, 19 nt, Artificial Sequence
  Description of Artificial Sequence: siNA antisense
gccauggcuagacgcuuuc

SEQ ID NO: 804 - RNA, 19 nt, Artificial Sequence
  Description of Artificial Sequence: siNA antisense
auacuaacgccauggcuag

SEQ ID NO: 805 - RNA, 19 nt, Artificial Sequence
  Description of Artificial Sequence: siNA antisense
aguuccucacaggggagug

SEQ ID NO: 806 - RNA, 19 nt, Artificial Sequence
  Description of Artificial Sequence: siNA antisense
uuugguuuuucuuugaggu

SEQ ID NO: 807 - RNA, 19 nt, Artificial Sequence
  Description of Artificial Sequence: siNA antisense
uggcuagacgcuuucugcg

SEQ ID NO: 808 - RNA, 19 nt, Artificial Sequence
  Description of Artificial Sequence: siNA antisense
gguaucgaugaccuuaccc

SEQ ID NO: 809 - RNA, 19 nt, Artificial Sequence
  Description of Artificial Sequence: siNA antisense
cauggcuagacgcuuucug

SEQ ID NO: 810 - RNA, 19 nt, Artificial Sequence
  Description of Artificial Sequence: siNA antisense
ugguuuuucuuugagguuu

SEQ ID NO: 811 - RNA, 19 nt, Artificial Sequence
  Description of Artificial Sequence: siNA antisense
auggcuagacgcuuucugc

SEQ ID NO: 812 - RNA, 19 nt, Artificial Sequence
  Description of Artificial Sequence: siNA antisense
ccauggcuagacgcuuucu

SEQ ID NO: 813 - RNA, 19 nt, Artificial Sequence
  Description of Artificial Sequence: siNA antisense
ggcuagacgcuuucugcgu

SEQ ID NO: 814 - RNA, 19 nt, Artificial Sequence
  Description of Artificial Sequence: siNA antisense
uugguuuuucuuugagguu

SEQ ID NO: 815 - RNA, 19 nt, Artificial Sequence
  Description of Artificial Sequence: siNA antisense
guaucgaugaccuuaccca

SEQ ID NO: 816 - RNA, 19 nt, Artificial Sequence
  Description of Artificial Sequence: siNA antisense
aggguaucgaugaccuuac

SEQ ID NO: 817 - RNA, 19 nt, Artificial Sequence
  Description of Artificial Sequence: siNA antisense
uagacgcuuucugcgugaa

SEQ ID NO: 818 - RNA, 19 nt, Artificial Sequence
  Description of Artificial Sequence: siNA antisense
ggguaucgaugaccuuacc

SEQ ID NO: 819 - RNA, 19 nt, Artificial Sequence
  Description of Artificial Sequence: siNA antisense
uuccucacaggggagugau

SEQ ID NO: 820 - RNA, 19 nt, Artificial Sequence
  Description of Artificial Sequence: siNA antisense
guuccucacaggggaguga

SEQ ID NO: 821 - RNA, 19 nt, Artificial Sequence
  Description of Artificial Sequence: siNA antisense
cgcuuucugcgugaagaca

SEQ ID NO: 822 - RNA, 19 nt, Artificial Sequence
  Description of Artificial Sequence: siNA antisense
cuagacgcuuucugcguga

SEQ ID NO: 823 - RNA, 19 nt, Artificial Sequence
  Description of Artificial Sequence: siNA antisense
gcuagacgcuuucugcgug

SEQ ID NO: 824 - RNA, 19 nt, Artificial Sequence
  Description of Artificial Sequence: siNA antisense
uccaagaaaggacccgguc

SEQ ID NO: 825 - RNA, 19 nt, Artificial Sequence
  Description of Artificial Sequence: siNA antisense
gugaagacaguaguuccuc

SEQ ID NO: 826 - RNA, 19 nt, Artificial Sequence
  Description of Artificial Sequence: siNA antisense
agacaguaguuccucacag

SEQ ID NO: 827 - RNA, 19 nt, Artificial Sequence
  Description of Artificial Sequence: siNA antisense
gcgugaagacaguaguucc

SEQ ID NO: 828 - RNA, 19 nt, Artificial Sequence
  Description of Artificial Sequence: siNA antisense
uaguuccucacaggggagu

SEQ ID NO: 829 - RNA, 19 nt, Artificial Sequence
  Description of Artificial Sequence: siNA antisense
acgcuuucugcgugaagac

SEQ ID NO: 830 - RNA, 19 nt, Artificial Sequence
  Description of Artificial Sequence: siNA antisense
cgugaagacaguaguuccu

SEQ ID NO: 831 - RNA, 19 nt, Artificial Sequence
  Description of Artificial Sequence: siNA antisense
gacaguaguuccucacagg

SEQ ID NO: 832 - RNA, 19 nt, Artificial Sequence
  Description of Artificial Sequence: siNA antisense
aagacaguaguuccucaca

SEQ ID NO: 833 - RNA, 19 nt, Artificial Sequence
  Description of Artificial Sequence: siNA antisense
gacgcuuucugcgugaaga

SEQ ID NO: 834 - RNA, 19 nt, Artificial Sequence
  Description of Artificial Sequence: siNA antisense
ugcgugaagacaguaguuc

SEQ ID NO: 835 - RNA, 19 nt, Artificial Sequence
  Description of Artificial Sequence: siNA antisense
acaguaguuccucacaggg

SEQ ID NO: 836 - RNA, 19 nt, Artificial Sequence
  Description of Artificial Sequence: siNA antisense
agacgcuuucugcgugaag

SEQ ID NO: 837 - RNA, 19 nt, Artificial Sequence
  Description of Artificial Sequence: siNA antisense
ugaagacaguaguuccuca

SEQ ID NO: 838 - RNA, 19 nt, Artificial Sequence
  Description of Artificial Sequence: siNA antisense
gacacucauacuaacgcca

SEQ ID NO: 839 - RNA, 19 nt, Artificial Sequence
  Description of Artificial Sequence: siNA antisense
caguaguuccucacagggg

SEQ ID NO: 840 - RNA, 19 nt, Artificial Sequence
  Description of Artificial Sequence: siNA antisense
gaagacaguaguuccucac

SEQ ID NO: 841 - RNA, 19 nt, Artificial Sequence
  Description of Artificial Sequence: siNA antisense
cgacacucauacuaacgcc

SEQ ID NO: 842 - RNA, 19 nt, Artificial Sequence
  Description of Artificial Sequence: siNA antisense
cgacccaacacuacucggc

SEQ ID NO: 843 - RNA, 19 nt, Artificial Sequence
  Description of Artificial Sequence: siNA antisense
cuuucugcgugaagacagu

SEQ ID NO: 844 - RNA, 19 nt, Artificial Sequence
  Description of Artificial Sequence: siNA antisense
caaggccuuucgcgaccca

SEQ ID NO: 845 - RNA, 19 nt, Artificial Sequence
  Description of Artificial Sequence: siNA antisense
uucugcgugaagacaguag

SEQ ID NO: 846 - RNA, 19 nt, Artificial Sequence
  Description of Artificial Sequence: siNA antisense
cgcgacccaacacuacucg

SEQ ID NO: 847 - RNA, 19 nt, Artificial Sequence
  Description of Artificial Sequence: siNA antisense
uuucgcgacccaacacuac

SEQ ID NO: 848 - RNA, 19 nt, Artificial Sequence
  Description of Artificial Sequence: siNA antisense
gguuuuucuuugagguuua

SEQ ID NO: 849 - RNA, 19 nt, Artificial Sequence
  Description of Artificial Sequence: siNA antisense
gcgacccaacacuacucgg

SEQ ID NO: 850 - RNA, 19 nt, Artificial Sequence
  Description of Artificial Sequence: siNA antisense
gacccaacacuacucggcu

SEQ ID NO: 851 - RNA, 19 nt, Artificial Sequence
  Description of Artificial Sequence: siNA antisense
ccacaaggccuuucgcgac

SEQ ID NO: 852 - RNA, 19 nt, Artificial Sequence
  Description of Artificial Sequence: siNA antisense
cuuucgcgacccaacacua

SEQ ID NO: 853 - RNA, 19 nt, Artificial Sequence
  Description of Artificial Sequence: siNA antisense
cccaacacuacucggcuag

SEQ ID NO: 854 - RNA, 19 nt, Artificial Sequence
  Description of Artificial Sequence: siNA antisense
ucgcgacccaacacuacuc

SEQ ID NO: 855 - RNA, 19 nt, Artificial Sequence
  Description of Artificial Sequence: siNA antisense
accacaaggccuuucgcga

SEQ ID NO: 856 - RNA, 19 nt, Artificial Sequence
  Description of Artificial Sequence: siNA antisense
acgacacucauacuaacgc

SEQ ID NO: 857 - RNA, 19 nt, Artificial Sequence
  Description of Artificial Sequence: siNA antisense
acccaacacuacucggcua

SEQ ID NO: 858 - RNA, 19 nt, Artificial Sequence
  Description of Artificial Sequence: siNA antisense
cugcgugaagacaguaguu

SEQ ID NO: 859 - RNA, 19 nt, Artificial Sequence
  Description of Artificial Sequence: siNA antisense
uaccacaaggccuuucgcg

SEQ ID NO: 860 - RNA, 19 nt, Artificial Sequence
  Description of Artificial Sequence: siNA antisense
ccuuucgcgacccaacacu

SEQ ID NO: 861 - RNA, 19 nt, Artificial Sequence
  Description of Artificial Sequence: siNA antisense
aggccuuucgcgacccaac

SEQ ID NO: 862 - RNA, 19 nt, Artificial Sequence
  Description of Artificial Sequence: siNA antisense
uucgcgacccaacacuacu

SEQ ID NO: 863 - RNA, 19 nt, Artificial Sequence
  Description of Artificial Sequence: siNA antisense
aaggccuuucgcgacccaa

SEQ ID NO: 864 - RNA, 19 nt, Artificial Sequence
  Description of Artificial Sequence: siNA antisense
aguaguuccucacagggga

SEQ ID NO: 865 - RNA, 19 nt, Artificial Sequence
  Description of Artificial Sequence: siNA antisense
uuucugcgugaagacagua

SEQ ID NO: 866 - RNA, 19 nt, Artificial Sequence
  Description of Artificial Sequence: siNA antisense
gccuuucgcgacccaacac

SEQ ID NO: 867 - RNA, 19 nt, Artificial Sequence
  Description of Artificial Sequence: siNA antisense
ucugcgugaagacaguagu

SEQ ID NO: 868 - RNA, 19 nt, Artificial Sequence
  Description of Artificial Sequence: siNA antisense
gcuuucugcgugaagacag

SEQ ID NO: 869 - RNA, 19 nt, Artificial Sequence
  Description of Artificial Sequence: siNA antisense
acaaggccuuucgcgaccc

SEQ ID NO: 870 - RNA, 19 nt, Artificial Sequence
  Description of Artificial Sequence: siNA antisense
uuuuucuuugagguuuagg

SEQ ID NO: 871 - RNA, 19 nt, Artificial Sequence
  Description of Artificial Sequence: siNA antisense
cacaaggccuuucgcgacc

SEQ ID NO: 872 - RNA, 19 nt, Artificial Sequence
  Description of Artificial Sequence: siNA antisense
guuuuucuuugagguuuag

SEQ ID NO: 873 - RNA, 19 nt, Artificial Sequence
  Description of Artificial Sequence: siNA antisense
ggccuuucgcgacccaaca

SEQ ID NO: 874 - RNA, 19 nt, Artificial Sequence
  Description of Artificial Sequence: siNA antisense
guaguuccucacaggggag

SEQ ID NO: 875 - RNA, 19 nt, Artificial Sequence
  Description of Artificial Sequence: siNA antisense
uuuucuuugagguuuagga

SEQ ID NO: 876 - RNA, 19 nt, Artificial Sequence
  Description of Artificial Sequence: siNA antisense
auccaagaaaggacccggu

SEQ ID NO: 877 - RNA, 19 nt, Artificial Sequence
  Description of Artificial Sequence: siNA antisense
uucuuugagguuuaggauu

SEQ ID NO: 878 - RNA, 19 nt, Artificial Sequence
  Description of Artificial Sequence: siNA antisense
ccaaaucuccaggcauuga

SEQ ID NO: 879 - RNA, 19 nt, Artificial Sequence
  Description of Artificial Sequence: siNA antisense
cgcccaaaucuccaggcau

SEQ ID NO: 880 - RNA, 19 nt, Artificial Sequence
  Description of Artificial Sequence: siNA antisense
gcccaaaucuccaggcauu

SEQ ID NO: 881 - RNA, 19 nt, Artificial Sequence
  Description of Artificial Sequence: siNA antisense
auguaccccaugaggucgg

SEQ ID NO: 882 - RNA, 19 nt, Artificial Sequence
  Description of Artificial Sequence: siNA antisense
aaaucuccaggcauugagc

SEQ ID NO: 883 - RNA, 19 nt, Artificial Sequence
  Description of Artificial Sequence: siNA antisense
caaaucuccaggcauugag

SEQ ID NO: 884 - RNA, 19 nt, Artificial Sequence
  Description of Artificial Sequence: siNA antisense
ccaacacuacucggcuagc

SEQ ID NO: 885 - RNA, 19 nt, Artificial Sequence
  Description of Artificial Sequence: siNA antisense
aaucuccaggcauugagcg

SEQ ID NO: 886 - RNA, 19 nt, Artificial Sequence
  Description of Artificial Sequence: siNA antisense
cccaaaucuccaggcauug

SEQ ID NO: 887 - RNA, 19 nt, Artificial Sequence
  Description of Artificial Sequence: siNA antisense
uguaccccaugaggucggc

SEQ ID NO: 888 - RNA, 19 nt, Artificial Sequence
  Description of Artificial Sequence: siNA antisense
uuucuuugagguuuaggau

SEQ ID NO: 889 - RNA, 19 nt, Artificial Sequence
  Description of Artificial Sequence: siNA antisense
cgggggcacgcccaaaucu

SEQ ID NO: 890 - RNA, 19 nt, Artificial Sequence
  Description of Artificial Sequence: siNA antisense
ucuccaggcauugagcggg

SEQ ID NO: 891 - RNA, 19 nt, Artificial Sequence
  Description of Artificial Sequence: siNA antisense
gggggcacgcccaaaucuc

SEQ ID NO: 892 - RNA, 19 nt, Artificial Sequence
  Description of Artificial Sequence: siNA antisense
ggggcacgcccaaaucucc

SEQ ID NO: 893 - RNA, 19 nt, Artificial Sequence
  Description of Artificial Sequence: siNA antisense
gcgggggcacgcccaaauc

SEQ ID NO: 894 - RNA, 19 nt, Artificial Sequence
  Description of Artificial Sequence: siNA antisense
aucuccaggcauugagcgg

SEQ ID NO: 895 - RNA, 19 nt, Artificial Sequence
  Description of Artificial Sequence: siNA antisense
cuggcaauuccgguguacu

SEQ ID NO: 896 - RNA, 19 nt, Artificial Sequence
  Description of Artificial Sequence: siNA antisense
uccuggcaauuccggugua

SEQ ID NO: 897 - RNA, 19 nt, Artificial Sequence
  Description of Artificial Sequence: siNA antisense
uggcaauuccgguguacuc

SEQ ID NO: 898 - RNA, 19 nt, Artificial Sequence
  Description of Artificial Sequence: siNA antisense
ccuggcaauuccgguguac

SEQ ID NO: 899 - RNA, 19 nt, Artificial Sequence
  Description of Artificial Sequence: siNA antisense
uggggccccugcgcggcaa

SEQ ID NO: 900 - RNA, 19 nt, Artificial Sequence
  Description of Artificial Sequence: siNA antisense
ggcacgcccaaaucuccag

SEQ ID NO: 901 - RNA, 19 nt, Artificial Sequence
  Description of Artificial Sequence: siNA antisense
ggggccccugcgcggcaac

SEQ ID NO: 902 - RNA, 19 nt, Artificial Sequence
  Description of Artificial Sequence: siNA antisense
cacgcccaaaucuccaggc

SEQ ID NO: 903 - RNA, 19 nt, Artificial Sequence
  Description of Artificial Sequence: siNA antisense
gggcacgcccaaaucucca

SEQ ID NO: 904 - RNA, 19 nt, Artificial Sequence
  Description of Artificial Sequence: siNA antisense
gcacgcccaaaucuccagg

SEQ ID NO: 905 - RNA, 19 nt, Artificial Sequence
  Description of Artificial Sequence: siNA antisense
caacacuacucggcuagca

SEQ ID NO: 906 - RNA, 19 nt, Artificial Sequence
  Description of Artificial Sequence: siNA antisense
acgcccaaaucuccaggca

SEQ ID NO: 907 - RNA, 19 nt, Artificial Sequence
  Description of Artificial Sequence: siNA antisense
aacacuacucggcuagcag

SEQ ID NO: 908 - RNA, 19 nt, Artificial Sequence
  Description of Artificial Sequence: siNA antisense
acacuacucggcuagcagu

SEQ ID NO: 909 - RNA, 19 nt, Artificial Sequence
  Description of Artificial Sequence: siNA antisense
cacuacucggcuagcaguc

SEQ ID NO: 910 - RNA, 19 nt, Artificial Sequence
  Description of Artificial Sequence: siNA antisense
acuacucggcuagcagucu

SEQ ID NO: 911 - RNA, 19 nt, Artificial Sequence
  Description of Artificial Sequence: siNA antisense
cuccaggcauugagcgggu

SEQ ID NO: 912 - RNA, 19 nt, Artificial Sequence
  Description of Artificial Sequence: siNA antisense
uccaggcauugagcggguu

SEQ ID NO: 913 - RNA, 19 nt, Artificial Sequence
  Description of Artificial Sequence: siNA antisense
cuggggccccugcgcggca

SEQ ID NO: 914 - RNA, 19 nt, Artificial Sequence
  Description of Artificial Sequence: siNA antisense
cacccaaccuggggccccu

SEQ ID NO: 915 - RNA, 19 nt, Artificial Sequence
  Description of Artificial Sequence: siNA antisense
cacacccaaccuggggccc

SEQ ID NO: 916 - RNA, 19 nt, Artificial Sequence
  Description of Artificial Sequence: siNA antisense
acccaaccuggggccccug

SEQ ID NO: 917 - RNA, 19 nt, Artificial Sequence
  Description of Artificial Sequence: siNA antisense
gcacacccaaccuggggcc

SEQ ID NO: 918 - RNA, 19 nt, Artificial Sequence
  Description of Artificial Sequence: siNA antisense
ccaaccuggggccccugcg

SEQ ID NO: 919 - RNA, 19 nt, Artificial Sequence
  Description of Artificial Sequence: siNA antisense
acaggagccauccugccca

SEQ ID NO: 920 - RNA, 19 nt, Artificial Sequence
  Description of Artificial Sequence: siNA antisense
cgcacacccaaccuggggc

SEQ ID NO: 921 - RNA, 19 nt, Artificial Sequence
  Description of Artificial Sequence: siNA antisense
cccaaccuggggccccugc

SEQ ID NO: 922 - RNA, 19 nt, Artificial Sequence
  Description of Artificial Sequence: siNA antisense
gacaggagccauccugccc

SEQ ID NO: 923 - RNA, 19 nt, Artificial Sequence
  Description of Artificial Sequence: siNA antisense
acacccaaccuggggcccc

SEQ ID NO: 924 - RNA, 19 nt, Artificial Sequence
  Description of Artificial Sequence: siNA antisense
ccuggggccccugcgcggc

SEQ ID NO: 925 - RNA, 19 nt, Artificial Sequence
  Description of Artificial Sequence: siNA antisense
caaccuggggccccugcgc

SEQ ID NO: 926 - RNA, 19 nt, Artificial Sequence
  Description of Artificial Sequence: siNA antisense
aaccuggggccccugcgcg

SEQ ID NO: 927 - RNA, 19 nt, Artificial Sequence
  Description of Artificial Sequence: siNA antisense
accuggggccccugcgcgg

SEQ ID NO: 928 - RNA, 19 nt, Artificial Sequence
  Description of Artificial Sequence: siNA antisense
gaaaggacccggucguccu

SEQ ID NO: 929 - RNA, 19 nt, Artificial Sequence
  Description of Artificial Sequence: siNA antisense
aaaggacccggucguccug

SEQ ID NO: 930 - RNA, 19 nt, Artificial Sequence
  Description of Artificial Sequence: siNA antisense
ggacccggucguccuggca

SEQ ID NO: 931 - RNA, 19 nt, Artificial Sequence
  Description of Artificial Sequence: siNA antisense
acccggucguccuggcaau

SEQ ID NO: 932 - RNA, 19 nt, Artificial Sequence
  Description of Artificial Sequence: siNA antisense
cccggucguccuggcaauu

SEQ ID NO: 933 - RNA, 19 nt, Artificial Sequence
  Description of Artificial Sequence: siNA antisense
gacccggucguccuggcaa

SEQ ID NO: 934 - RNA, 19 nt, Artificial Sequence
  Description of Artificial Sequence: siNA antisense
aaggacccggucguccugg

SEQ ID NO: 935 - RNA, 19 nt, Artificial Sequence
  Description of Artificial Sequence: siNA antisense
aggacccggucguccuggc

SEQ ID NO: 936 - RNA, 19 nt, Artificial Sequence
  Description of Artificial Sequence: siNA antisense
ccggucguccuggcaauuc

SEQ ID NO: 937 - RNA, 19 nt, Artificial Sequence
  Description of Artificial Sequence: siNA antisense
caagaaaggacccggucgu

SEQ ID NO: 938 - RNA, 19 nt, Artificial Sequence
  Description of Artificial Sequence: siNA antisense
aagaaaggacccggucguc

SEQ ID NO: 939 - RNA, 19 nt, Artificial Sequence
  Description of Artificial Sequence: siNA antisense
ccaagaaaggacccggucg

SEQ ID NO: 940 - RNA, 19 nt, Artificial Sequence
  Description of Artificial Sequence: siNA antisense
agaaaggacccggucgucc

SEQ ID NO: 941 - RNA, 19 nt, Artificial Sequence
  Description of Artificial Sequence: siNA antisense
gucguccuggcaauuccgg

SEQ ID NO: 942 - RNA, 19 nt, Artificial Sequence
  Description of Artificial Sequence: siNA antisense
guccuggcaauuccggugu

SEQ ID NO: 943 - RNA, 19 nt, Artificial Sequence
  Description of Artificial Sequence: siNA antisense
ucguccuggcaauuccggu

SEQ ID NO: 944 - RNA, 19 nt, Artificial Sequence
  Description of Artificial Sequence: siNA antisense
ggucguccuggcaauuccg

SEQ ID NO: 945 - RNA, 19 nt, Artificial Sequence
  Description of Artificial Sequence: siNA antisense
cggucguccuggcaauucc

SEQ ID NO: 946 - RNA, 19 nt, Artificial Sequence
  Description of Artificial Sequence: siNA antisense
cguccuggcaauuccggug

SEQ ID NO: 947 - RNA, 19 nt, Artificial Sequence
  Description of Artificial Sequence: siNA antisense
gcgcacacccaaccugggg

SEQ ID NO: 948 - RNA, 19 nt, Artificial Sequence
  Description of Artificial Sequence: siNA antisense
guaaacuccaccaacgauc

SEQ ID NO: 949 - RNA, 19 nt, Artificial Sequence
  Description of Artificial Sequence: siNA antisense
aaacuccaccaacgaucug

SEQ ID NO: 950 - RNA, 19 nt, Artificial Sequence
  Description of Artificial Sequence: siNA antisense
uaaacuccaccaacgaucu

SEQ ID NO: 951 - RNA, 19 nt, Artificial Sequence
  Description of Artificial Sequence: siNA antisense
cgcgcacacccaaccuggg

SEQ ID NO: 952 - RNA, 19 nt, Artificial Sequence
  Description of Artificial Sequence: siNA antisense
gcgcgcacacccaaccugg

SEQ ID NO: 953 - RNA, 19 nt, Artificial Sequence
  Description of Artificial Sequence: siNA antisense
ucgcgcgcacacccaaccu

SEQ ID NO: 954 - RNA, 19 nt, Artificial Sequence
  Description of Artificial Sequence: siNA antisense
cgcgcgcacacccaaccug

SEQ ID NO: 955 - RNA, 19 nt, Artificial Sequence
  Description of Artificial Sequence: siNA antisense
gucgcgcgcacacccaacc

SEQ ID NO: 956 - RNA, 19 nt, Artificial Sequence
  Description of Artificial Sequence: siNA antisense
guguuacguuugguuuuuc

SEQ ID NO: 957 - RNA, 19 nt, Artificial Sequence
  Description of Artificial Sequence: siNA antisense
uguuacguuugguuuuucu

SEQ ID NO: 958 - RNA, 19 nt, Artificial Sequence
  Description of Artificial Sequence: siNA antisense
guugguguuacguuugguu

SEQ ID NO: 959 - RNA, 19 nt, Artificial Sequence
  Description of Artificial Sequence: siNA antisense
uuacguuugguuuuucuuu

SEQ ID NO: 960 - RNA, 19 nt, Artificial Sequence
  Description of Artificial Sequence: siNA antisense
gguguuacguuugguuuuu

SEQ ID NO: 961 - RNA, 19 nt, Artificial Sequence
  Description of Artificial Sequence: siNA antisense
guuacguuugguuuuucuu

SEQ ID NO: 962 - RNA, 19 nt, Artificial Sequence
  Description of Artificial Sequence: siNA antisense
uacguuugguuuuucuuug

SEQ ID NO: 963 - RNA, 19 nt, Artificial Sequence
  Description of Artificial Sequence: siNA antisense
cgcgaccuacgccgggggu

SEQ ID NO: 964 - RNA, 19 nt, Artificial Sequence
  Description of Artificial Sequence: siNA antisense
gcgaccuacgccggggguc

SEQ ID NO: 965 - RNA, 19 nt, Artificial Sequence
  Description of Artificial Sequence: siNA antisense
cacgacacucauacuaacg

SEQ ID NO: 966 - RNA, 19 nt, Artificial Sequence
  Description of Artificial Sequence: siNA antisense
gcacgacacucauacuaac

SEQ ID NO: 967 - RNA, 19 nt, Artificial Sequence
  Description of Artificial Sequence: siNA antisense
ugcacgacacucauacuaa

SEQ ID NO: 968 - RNA, 19 nt, Artificial Sequence
  Description of Artificial Sequence: siNA antisense
cgguugguguuacguuugg

SEQ ID NO: 969 - RNA, 19 nt, Artificial Sequence
  Description of Artificial Sequence: siNA antisense
gguugguguuacguuuggu

SEQ ID NO: 970 - RNA, 19 nt, Artificial Sequence
  Description of Artificial Sequence: siNA antisense
cucgcgggggcacgcccaa

SEQ ID NO: 971 - RNA, 19 nt, Artificial Sequence
  Description of Artificial Sequence: siNA antisense
cgcgggggcacgcccaaau

SEQ ID NO: 972 - RNA, 19 nt, Artificial Sequence
  Description of Artificial Sequence: siNA antisense
ucgcgggggcacgcccaaa

SEQ ID NO: 973 - RNA, 19 nt, Artificial Sequence
  Description of Artificial Sequence: siNA antisense
uugguguuacguuugguuu

SEQ ID NO: 974 - RNA, 19 nt, Artificial Sequence
  Description of Artificial Sequence: siNA antisense
ucucgcgggggcacgccca

SEQ ID NO: 975 - RNA, 19 nt, Artificial Sequence
  Description of Artificial Sequence: siNA antisense
acuccaccaacgaucugac

SEQ ID NO: 976 - RNA, 19 nt, Artificial Sequence
  Description of Artificial Sequence: siNA antisense
ccuggaggcugcacgacac

SEQ ID NO: 977 - RNA, 19 nt, Artificial Sequence
  Description of Artificial Sequence: siNA antisense
cuccaccaacgaucugacc

SEQ ID NO: 978 - RNA, 19 nt, Artificial Sequence
  Description of Artificial Sequence: siNA antisense
cuggaggcugcacgacacu

SEQ ID NO: 979 - RNA, 19 nt, Artificial Sequence
  Description of Artificial Sequence: siNA antisense
uggaggcugcacgacacuc

SEQ ID NO: 980 - RNA, 19 nt, Artificial Sequence
  Description of Artificial Sequence: siNA antisense
cauggugcacggucuacga

SEQ ID NO: 981 - RNA, 19 nt, Artificial Sequence
  Description of Artificial Sequence: siNA antisense
gugcucauggugcacgguc

SEQ ID NO: 982 - RNA, 19 nt, Artificial Sequence
  Description of Artificial Sequence: siNA antisense
gcugcacgacacucauacu

SEQ ID NO: 983 - RNA, 19 nt, Artificial Sequence
  Description of Artificial Sequence: siNA antisense
cugcacgacacucauacua

SEQ ID NO: 984 - RNA, 19 nt, Artificial Sequence
  Description of Artificial Sequence: siNA antisense
aacuccaccaacgaucuga

SEQ ID NO: 985 - RNA, 19 nt, Artificial Sequence
  Description of Artificial Sequence: siNA antisense
ugcucauggugcacggucu

SEQ ID NO: 986 - RNA, 19 nt, Artificial Sequence
  Description of Artificial Sequence: siNA antisense
ugguguuacguuugguuuu

SEQ ID NO: 987 - RNA, 19 nt, Artificial Sequence
  Description of Artificial Sequence: siNA antisense
cucauggugcacggucuac

SEQ ID NO: 988 - RNA, 19 nt, Artificial Sequence
  Description of Artificial Sequence: siNA antisense
auggugcacggucuacgag

SEQ ID NO: 989 - RNA, 19 nt, Artificial Sequence
  Description of Artificial Sequence: siNA antisense
ucauggugcacggucuacg

SEQ ID NO: 990 - RNA, 19 nt, Artificial Sequence
  Description of Artificial Sequence: siNA antisense
uacccgggcugagcccagg

SEQ ID NO: 991 - RNA, 19 nt, Artificial Sequence
  Description of Artificial Sequence: siNA antisense
gcucauggugcacggucua

SEQ ID NO: 992 - RNA, 19 nt, Artificial Sequence
  Description of Artificial Sequence: siNA antisense
gugcacggucuacgagacc

SEQ ID NO: 993 - RNA, 19 nt, Artificial Sequence
  Description of Artificial Sequence: siNA antisense
uggugcacggucuacgaga

SEQ ID NO: 994 - RNA, 19 nt, Artificial Sequence
  Description of Artificial Sequence: siNA antisense
ggugcacggucuacgagac

SEQ ID NO: 995 - RNA, 19 nt, Artificial Sequence
  Description of Artificial Sequence: siNA antisense
uaucgaugaccuuacccaa

SEQ ID NO: 996 - RNA, 19 nt, Artificial Sequence
  Description of Artificial Sequence: siNA antisense
uaccccaugaggucggcga

SEQ ID NO: 997 - RNA, 19 nt, Artificial Sequence
  Description of Artificial Sequence: siNA antisense
guuugguuuuucuuugagg

SEQ ID NO: 998 - RNA, 19 nt, Artificial Sequence
  Description of Artificial Sequence: siNA antisense
gucucgcgggggcacgccc

SEQ ID NO: 999 - RNA, 19 nt, Artificial Sequence
  Description of Artificial Sequence: siNA antisense
gcuaucagccgguucaucc

SEQ ID NO: 1000 - RNA, 19 nt, Artificial Sequence
  Description of Artificial Sequence: siNA antisense
cuaucagccgguucaucca

SEQ ID NO: 1001 - RNA, 19 nt, Artificial Sequence
  Description of Artificial Sequence: siNA antisense
cguuugguuuuucuuugag

SEQ ID NO: 1002 - RNA, 19 nt, Artificial Sequence
  Description of Artificial Sequence: siNA antisense
accgcucggaagucuuccu

SEQ ID NO: 1003 - RNA, 19 nt, Artificial Sequence
  Description of Artificial Sequence: siNA antisense
acguuugguuuuucuuuga

SEQ ID NO: 1004 - RNA, 19 nt, Artificial Sequence
  Description of Artificial Sequence: siNA antisense
gaccgcucggaagucuucc

SEQ ID NO: 1005 - RNA, 19 nt, Artificial Sequence
  Description of Artificial Sequence: siNA antisense
guaccccaugaggucggcg

SEQ ID NO: 1006 - RNA, 19 nt, Artificial Sequence
  Description of Artificial Sequence: siNA antisense
gguugcgaccgcucggaag

SEQ ID NO: 1007 - RNA, 19 nt, Artificial Sequence
  Description of Artificial Sequence: siNA antisense
agucucgcgggggcacgcc

SEQ ID NO: 1008 - RNA, 19 nt, Artificial Sequence
  Description of Artificial Sequence: siNA antisense
aggcugcacgacacucaua

SEQ ID NO: 1009 - RNA, 19 nt, Artificial Sequence
  Description of Artificial Sequence: siNA antisense
uagcagucucgcgggggca

SEQ ID NO: 1010 - RNA, 19 nt, Artificial Sequence
  Description of Artificial Sequence: siNA antisense
uacucggcuagcagucucg

SEQ ID NO: 1011 - RNA, 19 nt, Artificial Sequence
  Description of Artificial Sequence: siNA antisense
ggaggcugcacgacacuca

SEQ ID NO: 1012 - RNA, 19 nt, Artificial Sequence
  Description of Artificial Sequence: siNA antisense
cuagcagucucgcgggggc

SEQ ID NO: 1013 - RNA, 19 nt, Artificial Sequence
  Description of Artificial Sequence: siNA antisense
cuacucggcuagcagucuc

SEQ ID NO: 1014 - RNA, 19 nt, Artificial Sequence
  Description of Artificial Sequence: siNA antisense
gcuagcagucucgcggggg

SEQ ID NO: 1015 - RNA, 19 nt, Artificial Sequence
  Description of Artificial Sequence: siNA antisense
cucggcuagcagucucgcg

SEQ ID NO: 1016 - RNA, 19 nt, Artificial Sequence
  Description of Artificial Sequence: siNA antisense
ggcugcacgacacucauac

SEQ ID NO: 1017 - RNA, 19 nt, Artificial Sequence
  Description of Artificial Sequence: siNA antisense
gaggcugcacgacacucau

SEQ ID NO: 1018 - RNA, 19 nt, Artificial Sequence
  Description of Artificial Sequence: siNA antisense
acucggcuagcagucucgc

SEQ ID NO: 1019 - RNA, 19 nt, Artificial Sequence
  Description of Artificial Sequence: siNA antisense
ggcuagcagucucgcgggg

SEQ ID NO: 1020 - RNA, 19 nt, Artificial Sequence
  Description of Artificial Sequence: siNA antisense
ucggcuagcagucucgcgg

SEQ ID NO: 1021 - RNA, 19 nt, Artificial Sequence
  Description of Artificial Sequence: siNA antisense
cggcuagcagucucgcggg

SEQ ID NO: 1022 - RNA, 19 nt, Artificial Sequence
  Description of Artificial Sequence: siNA antisense
cagucucgcgggggcacgc

SEQ ID NO: 1023 - RNA, 19 nt, Artificial Sequence
  Description of Artificial Sequence: siNA antisense
ucucccgggaggggggguc

SEQ ID NO: 1024 - RNA, 19 nt, Artificial Sequence
  Description of Artificial Sequence: siNA antisense
ugauccaagaaaggacccg

SEQ ID NO: 1025 - RNA, 19 nt, Artificial Sequence
  Description of Artificial Sequence: siNA antisense
agcagucucgcgggggcac

SEQ ID NO: 1026 - RNA, 19 nt, Artificial Sequence
  Description of Artificial Sequence: siNA antisense
gcagucucgcgggggcacg

SEQ ID NO: 1027 - RNA, 19 nt, Artificial Sequence
  Description of Artificial Sequence: siNA antisense
accccaugaggucggcgaa

SEQ ID NO: 1028 - RNA, 19 nt, Artificial Sequence
  Description of Artificial Sequence: siNA antisense
acuugacguccugugggcg

SEQ ID NO: 1029 - RNA, 19 nt, Artificial Sequence
  Description of Artificial Sequence: siNA antisense
aacuugacguccugugggc

SEQ ID NO: 1030 - RNA, 19 nt, Artificial Sequence
  Description of Artificial Sequence: siNA antisense
cucucccgggagggggggu

SEQ ID NO: 1031 - RNA, 19 nt, Artificial Sequence
  Description of Artificial Sequence: siNA antisense
cucccgggagggggggucc

SEQ ID NO: 1032 - RNA, 19 nt, Artificial Sequence
  Description of Artificial Sequence: siNA antisense
gauccaagaaaggacccgg

SEQ ID NO: 1033 - RNA, 19 nt, Artificial Sequence
  Description of Artificial Sequence: siNA antisense
cccgggaggggggguccug

SEQ ID NO: 1034 - RNA, 19 nt, Artificial Sequence
  Description of Artificial Sequence: siNA antisense
cccgggaacuugacguccu

SEQ ID NO: 1035 - RNA, 19 nt, Artificial Sequence
  Description of Artificial Sequence: siNA antisense
ucccgggaggggggguccu

SEQ ID NO: 1036 - RNA, 19 nt, Artificial Sequence
  Description of Artificial Sequence: siNA antisense
ggaacuugacguccugugg

SEQ ID NO: 1037 - RNA, 19 nt, Artificial Sequence
  Description of Artificial Sequence: siNA antisense
ccgggaacuugacguccug

SEQ ID NO: 1038 - RNA, 19 nt, Artificial Sequence
  Description of Artificial Sequence: siNA antisense
cgggaacuugacguccugu

SEQ ID NO: 1039 - RNA, 19 nt, Artificial Sequence
  Description of Artificial Sequence: siNA antisense
gggaacuugacguccugug

SEQ ID NO: 1040 - RNA, 19 nt, Artificial Sequence
  Description of Artificial Sequence: siNA antisense
ucagccgguucauccacug

SEQ ID NO: 1041 - RNA, 19 nt, Artificial Sequence
  Description of Artificial Sequence: siNA antisense
ggguacccgggcugagccc

SEQ ID NO: 1042 - RNA, 19 nt, Artificial Sequence
  Description of Artificial Sequence: siNA antisense
cgagguugcgaccgcucgg

SEQ ID NO: 1043 - RNA, 19 nt, Artificial Sequence
  Description of Artificial Sequence: siNA antisense
guacccgggcugagcccag

SEQ ID NO: 1044 - RNA, 19 nt, Artificial Sequence
  Description of Artificial Sequence: siNA antisense
aucagccgguucauccacu

SEQ ID NO: 1045 - RNA, 19 nt, Artificial Sequence
  Description of Artificial Sequence: siNA antisense
gagguugcgaccgcucgga

SEQ ID NO: 1046 - RNA, 19 nt, Artificial Sequence
  Description of Artificial Sequence: siNA antisense
gguacccgggcugagccca

SEQ ID NO: 1047 - RNA, 19 nt, Artificial Sequence
  Description of Artificial Sequence: siNA antisense
uagaggggccaaggguacc

SEQ ID NO: 1048 - RNA, 19 nt, Artificial Sequence
  Description of Artificial Sequence: siNA antisense
agguugcgaccgcucggaa

SEQ ID NO: 1049 - RNA, 19 nt, Artificial Sequence
  Description of Artificial Sequence: siNA antisense
agaggggccaaggguaccc

SEQ ID NO: 1050 - RNA, 19 nt, Artificial Sequence
  Description of Artificial Sequence: siNA antisense
uugauccaagaaaggaccc

SEQ ID NO: 1051 - RNA, 19 nt, Artificial Sequence
  Description of Artificial Sequence: siNA antisense
gaacuugacguccuguggg

SEQ ID NO: 1052 - RNA, 19 nt, Artificial Sequence
  Description of Artificial Sequence: siNA antisense
agauagagaaagagcaacc

SEQ ID NO: 1053 - RNA, 19 nt, Artificial Sequence
  Description of Artificial Sequence: siNA antisense
caggagccauccugcccac

SEQ ID NO: 1054 - RNA, 19 nt, Artificial Sequence
  Description of Artificial Sequence: siNA antisense
aggagccauccugcccacc

SEQ ID NO: 1055 - RNA, 19 nt, Artificial Sequence
  Description of Artificial Sequence: siNA antisense
aagauagagaaagagcaac

SEQ ID NO: 1056 - RNA, 19 nt, Artificial Sequence
  Description of Artificial Sequence: siNA antisense
uaucagccgguucauccac

SEQ ID NO: 1057 - RNA, 19 nt, Artificial Sequence
  Description of Artificial Sequence: siNA antisense
ccgggaggggggguccugg

SEQ ID NO: 1058 - RNA, 19 nt, Artificial Sequence
  Description of Artificial Sequence: siNA antisense
ggagccauccugcccaccc

SEQ ID NO: 1059 - RNA, 19 nt, Artificial Sequence
  Description of Artificial Sequence: siNA antisense
agucauagccuccgugaag

SEQ ID NO: 1060 - RNA, 19 nt, Artificial Sequence
  Description of Artificial Sequence: siNA antisense
acguccugugggcggcggu

SEQ ID NO: 1061 - RNA, 19 nt, Artificial Sequence
  Description of Artificial Sequence: siNA antisense
cgggaggggggguccugga

SEQ ID NO: 1062 - RNA, 19 nt, Artificial Sequence
  Description of Artificial Sequence: siNA antisense
gaccaguucaucaucauau

SEQ ID NO: 1063 - RNA, 19 nt, Artificial Sequence
  Description of Artificial Sequence: siNA antisense
uagucauagccuccgugaa

SEQ ID NO: 1064 - RNA, 19 nt, Artificial Sequence
  Description of Artificial Sequence: siNA antisense
cuagucauagccuccguga

SEQ ID NO: 1065 - RNA, 19 nt, Artificial Sequence
  Description of Artificial Sequence: siNA antisense
acgcuaucagccgguucau

SEQ ID NO: 1066 - RNA, 19 nt, Artificial Sequence
  Description of Artificial Sequence: siNA antisense
caguucaucaucauauccc

SEQ ID NO: 1067 - RNA, 19 nt, Artificial Sequence
  Description of Artificial Sequence: siNA antisense
agccgguucauccacugca

SEQ ID NO: 1068 - RNA, 19 nt, Artificial Sequence
  Description of Artificial Sequence: siNA antisense
gccgguucauccacugcac

SEQ ID NO: 1069 - RNA, 19 nt, Artificial Sequence
  Description of Artificial Sequence: siNA antisense
aacgcuaucagccgguuca

SEQ ID NO: 1070 - RNA, 19 nt, Artificial Sequence
  Description of Artificial Sequence: siNA antisense
ccaguucaucaucauaucc

SEQ ID NO: 1071 - RNA, 19 nt, Artificial Sequence
  Description of Artificial Sequence: siNA antisense
aggaagauagagaaagagc

SEQ ID NO: 1072 - RNA, 19 nt, Artificial Sequence
  Description of Artificial Sequence: siNA antisense
augguggagugucgccccc

SEQ ID NO: 1073 - RNA, 19 nt, Artificial Sequence
  Description of Artificial Sequence: siNA antisense
cgcuaucagccgguucauc

SEQ ID NO: 1074 - RNA, 19 nt, Artificial Sequence
  Description of Artificial Sequence: siNA antisense
accaguucaucaucauauc

SEQ ID NO: 1075 - RNA, 19 nt, Artificial Sequence
  Description of Artificial Sequence: siNA antisense
aguucaucaucauauccca

SEQ ID NO: 1076 - RNA, 19 nt, Artificial Sequence
  Description of Artificial Sequence: siNA antisense
gaagauagagaaagagcaa

SEQ ID NO: 1077 - RNA, 19 nt, Artificial Sequence
  Description of Artificial Sequence: siNA antisense
ugguggagugucgccccca

SEQ ID NO: 1078 - RNA, 19 nt, Artificial Sequence
  Description of Artificial Sequence: siNA antisense
ggaagauagagaaagagca

SEQ ID NO: 1079 - RNA, 19 nt, Artificial Sequence
  Description of Artificial Sequence: siNA antisense
guugauccaagaaaggacc

SEQ ID NO: 1080 - RNA, 19 nt, Artificial Sequence
  Description of Artificial Sequence: siNA antisense
gcgaccgcucggaagucuu

SEQ ID NO: 1081 - RNA, 19 nt, Artificial Sequence
  Description of Artificial Sequence: siNA antisense
ggccaaggguacccgggcu

SEQ ID NO: 1082 - RNA, 19 nt, Artificial Sequence
  Description of Artificial Sequence: siNA antisense
agcggguugauccaagaaa

SEQ ID NO: 1083 - RNA, 19 nt, Artificial Sequence
  Description of Artificial Sequence: siNA antisense
gccaaggguacccgggcug

SEQ ID NO: 1084 - RNA, 19 nt, Artificial Sequence
  Description of Artificial Sequence: siNA antisense
ugcgaccgcucggaagucu

SEQ ID NO: 1085 - RNA, 19 nt, Artificial Sequence
  Description of Artificial Sequence: siNA antisense
gagcggguugauccaagaa

SEQ ID NO: 1086 - RNA, 19 nt, Artificial Sequence
  Description of Artificial Sequence: siNA antisense
ggggccaaggguacccggg

SEQ ID NO: 1087 - RNA, 19 nt, Artificial Sequence
  Description of Artificial Sequence: siNA antisense
gguugauccaagaaaggac

SEQ ID NO: 1088 - RNA, 19 nt, Artificial Sequence
  Description of Artificial Sequence: siNA antisense
gcggguugauccaagaaag

SEQ ID NO: 1089 - RNA, 19 nt, Artificial Sequence
  Description of Artificial Sequence: siNA antisense
cggguugauccaagaaagg

SEQ ID NO: 1090 - RNA, 19 nt, Artificial Sequence
  Description of Artificial Sequence: siNA antisense
ggguugauccaagaaagga

SEQ ID NO: 1091 - RNA, 19 nt, Artificial Sequence
  Description of Artificial Sequence: siNA antisense
gaccaccgcccgggaacuu

SEQ ID NO: 1092 - RNA, 19 nt, Artificial Sequence
  Description of Artificial Sequence: siNA antisense
cagccgguucauccacugc

SEQ ID NO: 1093 - RNA, 19 nt, Artificial Sequence
  Description of Artificial Sequence: siNA antisense
aggggccaaggguacccgg

SEQ ID NO: 1094 - RNA, 19 nt, Artificial Sequence
  Description of Artificial Sequence: siNA antisense
ugaccaccgcccgggaacu

SEQ ID NO: 1095 - RNA, 19 nt, Artificial Sequence
  Description of Artificial Sequence: siNA antisense
uugagcggguugauccaag

SEQ ID NO: 1096 - RNA, 19 nt, Artificial Sequence
  Description of Artificial Sequence: siNA antisense
gcauugagcggguugaucc

SEQ ID NO: 1097 - RNA, 19 nt, Artificial Sequence
  Description of Artificial Sequence: siNA antisense
guugcgaccgcucggaagu

SEQ ID NO: 1098 - RNA, 19 nt, Artificial Sequence
  Description of Artificial Sequence: siNA antisense
ugagcggguugauccaaga

SEQ ID NO: 1099 - RNA, 19 nt, Artificial Sequence
  Description of Artificial Sequence: siNA antisense
auugagcggguugauccaa

SEQ ID NO: 1100 - RNA, 19 nt, Artificial Sequence
  Description of Artificial Sequence: siNA antisense
cguccugugggcggcgguu

SEQ ID NO: 1101 - RNA, 19 nt, Artificial Sequence
  Description of Artificial Sequence: siNA antisense
ccuguugcauaguucacgc

SEQ ID NO: 1102 - RNA, 19 nt, Artificial Sequence
  Description of Artificial Sequence: siNA antisense
aggcauugagcggguugau

SEQ ID NO: 1103 - RNA, 19 nt, Artificial Sequence
  Description of Artificial Sequence: siNA antisense
ggcauugagcggguugauc

SEQ ID NO: 1104 - RNA, 19 nt, Artificial Sequence
  Description of Artificial Sequence: siNA antisense
ccaggcauugagcggguug

SEQ ID NO: 1105 - RNA, 19 nt, Artificial Sequence
  Description of Artificial Sequence: siNA antisense
cccaugaggucggcgaagc

SEQ ID NO: 1106 - RNA, 19 nt, Artificial Sequence
  Description of Artificial Sequence: siNA antisense
uugcgaccgcucggaaguc

SEQ ID NO: 1107 - RNA, 19 nt, Artificial Sequence
  Description of Artificial Sequence: siNA antisense
caggcauugagcggguuga

SEQ ID NO: 1108 - RNA, 19 nt, Artificial Sequence
  Description of Artificial Sequence: siNA antisense
ccaugaggucggcgaagcc

SEQ ID NO: 1109 - RNA, 19 nt, Artificial Sequence
  Description of Artificial Sequence: siNA antisense
cauugagcggguugaucca

SEQ ID NO: 1110 - RNA, 19 nt, Artificial Sequence
  Description of Artificial Sequence: siNA antisense
acgaucugaccaccgcccg

SEQ ID NO: 1111 - RNA, 19 nt, Artificial Sequence
  Description of Artificial Sequence: siNA antisense
uugccauagaggggccaag

SEQ ID NO: 1112 - RNA, 19 nt, Artificial Sequence
  Description of Artificial Sequence: siNA antisense
cgaucugaccaccgcccgg

SEQ ID NO: 1113 - RNA, 19 nt, Artificial Sequence
  Description of Artificial Sequence: siNA antisense
agccauccugcccacccca

SEQ ID NO: 1114 - RNA, 19 nt, Artificial Sequence
  Description of Artificial Sequence: siNA antisense
gcggcaacagguaaacucc

SEQ ID NO: 1115 - RNA, 19 nt, Artificial Sequence
  Description of Artificial Sequence: siNA antisense
ugccauagaggggccaagg

SEQ ID NO: 1116 - RNA, 19 nt, Artificial Sequence
  Description of Artificial Sequence: siNA antisense
ggcaacagguaaacuccac

SEQ ID NO: 1117 - RNA, 19 nt, Artificial Sequence
  Description of Artificial Sequence: siNA antisense
gcaacagguaaacuccacc

SEQ ID NO: 1118 - RNA, 19 nt, Artificial Sequence
  Description of Artificial Sequence: siNA antisense
ucugaccaccgcccgggaa

SEQ ID NO: 1119 - RNA, 19 nt, Artificial Sequence
  Description of Artificial Sequence: siNA antisense
uucccuguugcauaguuca

SEQ ID NO: 1120 - RNA, 19 nt, Artificial Sequence
  Description of Artificial Sequence: siNA antisense
gcgcggcaacagguaaacu

SEQ ID NO: 1121 - RNA, 19 nt, Artificial Sequence
  Description of Artificial Sequence: siNA antisense
ucccuguugcauaguucac

SEQ ID NO: 1122 - RNA, 19 nt, Artificial Sequence
  Description of Artificial Sequence: siNA antisense
ccugcgcggcaacagguaa

SEQ ID NO: 1123 - RNA, 19 nt, Artificial Sequence
  Description of Artificial Sequence: siNA antisense
aucugaccaccgcccggga

SEQ ID NO: 1124 - RNA, 19 nt, Artificial Sequence
  Description of Artificial Sequence: siNA antisense
cugaccaccgcccgggaac

SEQ ID NO: 1125 - RNA, 19 nt, Artificial Sequence
  Description of Artificial Sequence: siNA antisense
gggccaaggguacccgggc

SEQ ID NO: 1126 - RNA, 19 nt, Artificial Sequence
  Description of Artificial Sequence: siNA antisense
ccuucgccuucaucuccuu

SEQ ID NO: 1127 - RNA, 19 nt, Artificial Sequence
  Description of Artificial Sequence: siNA antisense
gccuucgccuucaucuccu

SEQ ID NO: 1128 - RNA, 19 nt, Artificial Sequence
  Description of Artificial Sequence: siNA antisense
ugcgcggcaacagguaaac

SEQ ID NO: 1129 - RNA, 19 nt, Artificial Sequence
  Description of Artificial Sequence: siNA antisense
ggccccugcgcggcaacag

SEQ ID NO: 1130 - RNA, 19 nt, Artificial Sequence
  Description of Artificial Sequence: siNA antisense
gugggcggcgguugguguu

SEQ ID NO: 1131 - RNA, 19 nt, Artificial Sequence
  Description of Artificial Sequence: siNA antisense
cgcggcaacagguaaacuc

SEQ ID NO: 1132 - RNA, 19 nt, Artificial Sequence
  Description of Artificial Sequence: siNA antisense
cugcgcggcaacagguaaa

SEQ ID NO: 1133 - RNA, 19 nt, Artificial Sequence
  Description of Artificial Sequence: siNA antisense
gagccauccugcccacccc

SEQ ID NO: 1134 - RNA, 19 nt, Artificial Sequence
  Description of Artificial Sequence: siNA antisense
cgaccgcucggaagucuuc

SEQ ID NO: 1135 - RNA, 19 nt, Artificial Sequence
  Description of Artificial Sequence: siNA antisense
ccccugcgcggcaacaggu

SEQ ID NO: 1136 - RNA, 19 nt, Artificial Sequence
  Description of Artificial Sequence: siNA antisense
cccugcgcggcaacaggua

SEQ ID NO: 1137 - RNA, 19 nt, Artificial Sequence
  Description of Artificial Sequence: siNA antisense
cugcccaguugaagaggua

SEQ ID NO: 1138 - RNA, 19 nt, Artificial Sequence
  Description of Artificial Sequence: siNA antisense
cccuguugcauaguucacg

SEQ ID NO: 1139 - RNA, 19 nt, Artificial Sequence
  Description of Artificial Sequence: siNA antisense
ugugggcggcgguuggugu

SEQ ID NO: 1140 - RNA, 19 nt, Artificial Sequence
  Description of Artificial Sequence: siNA antisense
gaucugaccaccgcccggg

SEQ ID NO: 1141 - RNA, 19 nt, Artificial Sequence
  Description of Artificial Sequence: siNA antisense
acugcccaguugaagaggu

SEQ ID NO: 1142 - RNA, 19 nt, Artificial Sequence
  Description of Artificial Sequence: siNA antisense
ccccaugaggucggcgaag

SEQ ID NO: 1143 - RNA, 19 nt, Artificial Sequence
  Description of Artificial Sequence: siNA antisense
gccccugcgcggcaacagg

SEQ ID NO: 1144 - RNA, 19 nt, Artificial Sequence
  Description of Artificial Sequence: siNA antisense
uccugugggcggcgguugg

SEQ ID NO: 1145 - RNA, 19 nt, Artificial Sequence
  Description of Artificial Sequence: siNA antisense
ccugugggcggcgguuggu

SEQ ID NO: 1146 - RNA, 19 nt, Artificial Sequence
  Description of Artificial Sequence: siNA antisense
cggcaacagguaaacucca

SEQ ID NO: 1147 - RNA, 19 nt, Artificial Sequence
  Description of Artificial Sequence: siNA antisense
cugugggcggcgguuggug

SEQ ID NO: 1148 - RNA, 19 nt, Artificial Sequence
  Description of Artificial Sequence: siNA antisense
gcgguugguguuacguuug

SEQ ID NO: 1149 - RNA, 19 nt, Artificial Sequence
  Description of Artificial Sequence: siNA antisense
cuccagccgucuccgcuug

SEQ ID NO: 1150 - RNA, 19 nt, Artificial Sequence
  Description of Artificial Sequence: siNA antisense
accuagucauagccuccgu

SEQ ID NO: 1151 - RNA, 19 nt, Artificial Sequence
  Description of Artificial Sequence: siNA antisense
ugggcggcgguugguguua

SEQ ID NO: 1152 - RNA, 19 nt, Artificial Sequence
  Description of Artificial Sequence: siNA antisense
gguaaacuccaccaacgau

SEQ ID NO: 1153 - RNA, 19 nt, Artificial Sequence
  Description of Artificial Sequence: siNA antisense
gcugugauauaugucuccc

SEQ ID NO: 1154 - RNA, 19 nt, Artificial Sequence
  Description of Artificial Sequence: siNA antisense
ugucgccuuccacgagguu

SEQ ID NO: 1155 - RNA, 19 nt, Artificial Sequence
  Description of Artificial Sequence: siNA antisense
ugugauauaugucuccccc

SEQ ID NO: 1156 - RNA, 19 nt, Artificial Sequence
  Description of Artificial Sequence: siNA antisense
cggcgguugguguuacguu

SEQ ID NO: 1157 - RNA, 19 nt, Artificial Sequence
  Description of Artificial Sequence: siNA antisense
ggcgguugguguuacguuu

SEQ ID NO: 1158 - RNA, 19 nt, Artificial Sequence
  Description of Artificial Sequence: siNA antisense
cugugauauaugucucccc

SEQ ID NO: 1159 - RNA, 19 nt, Artificial Sequence
  Description of Artificial Sequence: siNA antisense
acgccuucgccuucaucuc

SEQ ID NO: 1160 - RNA, 19 nt, Artificial Sequence
  Description of Artificial Sequence: siNA antisense
gcuccagccgucuccgcuu

SEQ ID NO: 1161 - RNA, 19 nt, Artificial Sequence
  Description of Artificial Sequence: siNA antisense
auagaggggccaaggguac

SEQ ID NO: 1162 - RNA, 19 nt, Artificial Sequence
  Description of Artificial Sequence: siNA antisense
ggaggggggguccuggagg

SEQ ID NO: 1163 - RNA, 19 nt, Artificial Sequence
  Description of Artificial Sequence: siNA antisense
gggaggggggguccuggag

SEQ ID NO: 1164 - RNA, 19 nt, Artificial Sequence
  Description of Artificial Sequence: siNA antisense
cauagaggggccaagggua

SEQ ID NO: 1165 - RNA, 19 nt, Artificial Sequence
  Description of Artificial Sequence: siNA antisense
gucgccuuccacgagguug

SEQ ID NO: 1166 - RNA, 19 nt, Artificial Sequence
  Description of Artificial Sequence: siNA antisense
uaccuagucauagccuccg

SEQ ID NO: 1167 - RNA, 19 nt, Artificial Sequence
  Description of Artificial Sequence: siNA antisense
cgccuucgccuucaucucc

SEQ ID NO: 1168 - RNA, 19 nt, Artificial Sequence
  Description of Artificial Sequence: siNA antisense
gacgccuucgccuucaucu

SEQ ID NO: 1169 - RNA, 19 nt, Artificial Sequence
  Description of Artificial Sequence: siNA antisense
gggcggcgguugguguuac

SEQ ID NO: 1170 - RNA, 19 nt, Artificial Sequence
  Description of Artificial Sequence: siNA antisense
ggcggcgguugguguuacg

SEQ ID NO: 1171 - RNA, 19 nt, Artificial Sequence
  Description of Artificial Sequence: siNA antisense
gcggcgguugguguuacgu

SEQ ID NO: 1172 - RNA, 19 nt, Artificial Sequence
  Description of Artificial Sequence: siNA antisense
ccuagucauagccuccgug

SEQ ID NO: 1173 - RNA, 19 nt, Artificial Sequence
  Description of Artificial Sequence: siNA antisense
acagguaaacuccaccaac

SEQ ID NO: 1174 - RNA, 19 nt, Artificial Sequence
  Description of Artificial Sequence: siNA antisense
cagguaaacuccaccaacg

SEQ ID NO: 1175 - RNA, 19 nt, Artificial Sequence
  Description of Artificial Sequence: siNA antisense
ccauagaggggccaagggu

SEQ ID NO: 1176 - RNA, 19 nt, Artificial Sequence
  Description of Artificial Sequence: siNA antisense
aacagguaaacuccaccaa

SEQ ID NO: 1177 - RNA, 19 nt, Artificial Sequence
  Description of Artificial Sequence: siNA antisense
caacagguaaacuccacca

SEQ ID NO: 1178 - RNA, 19 nt, Artificial Sequence
  Description of Artificial Sequence: siNA antisense
agguaaacuccaccaacga

SEQ ID NO: 1179 - RNA, 19 nt, Artificial Sequence
  Description of Artificial Sequence: siNA antisense
gaggggccaaggguacccg

SEQ ID NO: 1180 - RNA, 19 nt, Artificial Sequence
  Description of Artificial Sequence: siNA antisense
aggguacccgggcugagcc

SEQ ID NO: 1181 - RNA, 19 nt, Artificial Sequence
  Description of Artificial Sequence: siNA antisense
uccucacaggggagugauc

SEQ ID NO: 1182 - RNA, 19 nt, Artificial Sequence
  Description of Artificial Sequence: siNA antisense
caccaacgaucugaccacc

SEQ ID NO: 1183 - RNA, 19 nt, Artificial Sequence
  Description of Artificial Sequence: siNA antisense
ggacgccuucgccuucauc

SEQ ID NO: 1184 - RNA, 19 nt, Artificial Sequence
  Description of Artificial Sequence: siNA antisense
gggugacaggagccauccu

SEQ ID NO: 1185 - RNA, 19 nt, Artificial Sequence
  Description of Artificial Sequence: siNA antisense
caaggguacccgggcugag

SEQ ID NO: 1186 - RNA, 19 nt, Artificial Sequence
  Description of Artificial Sequence: siNA antisense
ccaaggguacccgggcuga

SEQ ID NO: 1187 - RNA, 19 nt, Artificial Sequence
  Description of Artificial Sequence: siNA antisense
uggacgccuucgccuucau

SEQ ID NO: 1188 - RNA, 19 nt, Artificial Sequence
  Description of Artificial Sequence: siNA antisense
gugauauaugucucccccg

SEQ ID NO: 1189 - RNA, 19 nt, Artificial Sequence
  Description of Artificial Sequence: siNA antisense
ggugacaggagccauccug

SEQ ID NO: 1190 - RNA, 19 nt, Artificial Sequence
  Description of Artificial Sequence: siNA antisense
guggacgccuucgccuuca

SEQ ID NO: 1191 - RNA, 19 nt, Artificial Sequence
  Description of Artificial Sequence: siNA antisense
uccaccaacgaucugacca

SEQ ID NO: 1192 - RNA, 19 nt, Artificial Sequence
  Description of Artificial Sequence: siNA antisense
aaggguacccgggcugagc

SEQ ID NO: 1193 - RNA, 19 nt, Artificial Sequence
  Description of Artificial Sequence: siNA antisense
ccaccaacgaucugaccac

SEQ ID NO: 1194 - RNA, 19 nt, Artificial Sequence
  Description of Artificial Sequence: siNA antisense
ggggggguccuggaggcug

SEQ ID NO: 1195 - RNA, 19 nt, Artificial Sequence
  Description of Artificial Sequence: siNA antisense
caacgaucugaccaccgcc

SEQ ID NO: 1196 - RNA, 19 nt, Artificial Sequence
  Description of Artificial Sequence: siNA antisense
gaggggggguccuggaggc

SEQ ID NO: 1197 - RNA, 19 nt, Artificial Sequence
  Description of Artificial Sequence: siNA antisense
cgaacgcuaucagccgguu

SEQ ID NO: 1198 - RNA, 19 nt, Artificial Sequence
  Description of Artificial Sequence: siNA antisense
aggggggguccuggaggcu

SEQ ID NO: 1199 - RNA, 19 nt, Artificial Sequence
  Description of Artificial Sequence: siNA antisense
caugaggucggcgaagccg

SEQ ID NO: 1200 - RNA, 19 nt, Artificial Sequence
  Description of Artificial Sequence: siNA antisense
gcgcuccagccgucuccgc

SEQ ID NO: 1201 - RNA, 19 nt, Artificial Sequence
  Description of Artificial Sequence: siNA antisense
agcggaauguaccccauga

SEQ ID NO: 1202 - RNA, 19 nt, Artificial Sequence
  Description of Artificial Sequence: siNA antisense
gaacgcuaucagccgguuc

SEQ ID NO: 1203 - RNA, 19 nt, Artificial Sequence
  Description of Artificial Sequence: siNA antisense
ccaacgaucugaccaccgc

SEQ ID NO: 1204 - RNA, 19 nt, Artificial Sequence
  Description of Artificial Sequence: siNA antisense
ugacaggagccauccugcc

SEQ ID NO: 1205 - RNA, 19 nt, Artificial Sequence
  Description of Artificial Sequence: siNA antisense
gugacaggagccauccugc

SEQ ID NO: 1206 - RNA, 19 nt, Artificial Sequence
  Description of Artificial Sequence: siNA antisense
ucgaugaccuuacccaaau

SEQ ID NO: 1207 - RNA, 19 nt, Artificial Sequence
  Description of Artificial Sequence: siNA antisense
gcgaacgcuaucagccggu

SEQ ID NO: 1208 - RNA, 19 nt, Artificial Sequence
  Description of Artificial Sequence: siNA antisense
cgcgcuccagccgucuccg

SEQ ID NO: 1209 - RNA, 19 nt, Artificial Sequence
  Description of Artificial Sequence: siNA antisense
augaggucggcgaagccgc

SEQ ID NO: 1210 - RNA, 19 nt, Artificial Sequence
  Description of Artificial Sequence: siNA antisense
cgaugaccuuacccaaauu

SEQ ID NO: 1211 - RNA, 19 nt, Artificial Sequence
  Description of Artificial Sequence: siNA antisense
aacgaucugaccaccgccc

SEQ ID NO: 1212 - RNA, 19 nt, Artificial Sequence
  Description of Artificial Sequence: siNA antisense
guccugugggcggcgguug

SEQ ID NO: 1213 - RNA, 19 nt, Artificial Sequence
  Description of Artificial Sequence: siNA antisense
ugaggucggcgaagccgca

SEQ ID NO: 1214 - RNA, 19 nt, Artificial Sequence
  Description of Artificial Sequence: siNA antisense
accaacgaucugaccaccg

SEQ ID NO: 1215 - RNA, 19 nt, Artificial Sequence
  Description of Artificial Sequence: siNA antisense
uagucgcgcgcacacccaa

SEQ ID NO: 1216 - RNA, 19 nt, Artificial Sequence
  Description of Artificial Sequence: siNA antisense
uuccuagucgcgcgcacac

SEQ ID NO: 1217 - RNA, 19 nt, Artificial Sequence
  Description of Artificial Sequence: siNA antisense
cggggugacaggagccauc

SEQ ID NO: 1218 - RNA, 19 nt, Artificial Sequence
  Description of Artificial Sequence: siNA antisense
ggggugacaggagccaucc

SEQ ID NO: 1219 - RNA, 19 nt, Artificial Sequence
  Description of Artificial Sequence: siNA antisense
cuuccuagucgcgcgcaca

SEQ ID NO: 1220 - RNA, 19 nt, Artificial Sequence
  Description of Artificial Sequence: siNA antisense
cuagucgcgcgcacaccca

SEQ ID NO: 1221 - RNA, 19 nt, Artificial Sequence
  Description of Artificial Sequence: siNA antisense
uccuagucgcgcgcacacc

SEQ ID NO: 1222 - RNA, 19 nt, Artificial Sequence
  Description of Artificial Sequence: siNA antisense
ccuagucgcgcgcacaccc

SEQ ID NO: 1223 - RNA, 19 nt, Artificial Sequence
  Description of Artificial Sequence: siNA antisense
uacgcgaccuacgccgggg

SEQ ID NO: 1224 - RNA, 19 nt, Artificial Sequence
  Description of Artificial Sequence: siNA antisense
gggauagguugucgccuuc

SEQ ID NO: 1225 - RNA, 19 nt, Artificial Sequence
  Description of Artificial Sequence: siNA antisense
uuacgcgaccuacgccggg

SEQ ID NO: 1226 - RNA, 19 nt, Artificial Sequence
  Description of Artificial Sequence: siNA antisense
cgcuccagccgucuccgcu

SEQ ID NO: 1227 - RNA, 19 nt, Artificial Sequence
  Description of Artificial Sequence: siNA antisense
acgcgaccuacgccggggg

SEQ ID NO: 1228 - RNA, 19 nt, Artificial Sequence
  Description of Artificial Sequence: siNA antisense
acuguggacgccuucgccu

SEQ ID NO: 1229 - RNA, 19 nt, Artificial Sequence
  Description of Artificial Sequence: siNA antisense
cuguggacgccuucgccuu

SEQ ID NO: 1230 - RNA, 19 nt, Artificial Sequence
  Description of Artificial Sequence: siNA antisense
agucgcgcgcacacccaac

SEQ ID NO: 1231 - RNA, 19 nt, Artificial Sequence
  Description of Artificial Sequence: siNA antisense
gcggaauguaccccaugag

SEQ ID NO: 1232 - RNA, 19 nt, Artificial Sequence
  Description of Artificial Sequence: siNA antisense
ggauagguugucgccuucc

SEQ ID NO: 1233 - RNA, 19 nt, Artificial Sequence
  Description of Artificial Sequence: siNA antisense
ccgucggcaaggaacuugc

SEQ ID NO: 1234 - RNA, 19 nt, Artificial Sequence
  Description of Artificial Sequence: siNA antisense
ggggguccuggaggcugca

SEQ ID NO: 1235 - RNA, 19 nt, Artificial Sequence
  Description of Artificial Sequence: siNA antisense
cacgagcaucgugcagucc

SEQ ID NO: 1236 - RNA, 19 nt, Artificial Sequence
  Description of Artificial Sequence: siNA antisense
uguggacgccuucgccuuc

SEQ ID NO: 1237 - RNA, 19 nt, Artificial Sequence
  Description of Artificial Sequence: siNA antisense
ucgccuuccacgagguugc

SEQ ID NO: 1238 - RNA, 19 nt, Artificial Sequence
  Description of Artificial Sequence: siNA antisense
accaagcacagcccgcguc

SEQ ID NO: 1239 - RNA, 19 nt, Artificial Sequence
  Description of Artificial Sequence: siNA antisense
uaccaagcacagcccgcgu

SEQ ID NO: 1240 - RNA, 19 nt, Artificial Sequence
  Description of Artificial Sequence: siNA antisense
gggguccuggaggcugcac

SEQ ID NO: 1241 - RNA, 19 nt, Artificial Sequence
  Description of Artificial Sequence: siNA antisense
gggggguccuggaggcugc

SEQ ID NO: 1242 - RNA, 19 nt, Artificial Sequence
  Description of Artificial Sequence: siNA antisense
cgccuuccacgagguugcg

SEQ ID NO: 1243 - RNA, 19 nt, Artificial Sequence
  Description of Artificial Sequence: siNA antisense
uccuggaggcugcacgaca

SEQ ID NO: 1244 - RNA, 19 nt, Artificial Sequence
  Description of Artificial Sequence: siNA antisense
ucaucauaucccaagccau

SEQ ID NO: 1245 - RNA, 19 nt, Artificial Sequence
  Description of Artificial Sequence: siNA antisense
uucaucaucauaucccaag

SEQ ID NO: 1246 - RNA, 19 nt, Artificial Sequence
  Description of Artificial Sequence: siNA antisense
gccauagaggggccaaggg

SEQ ID NO: 1247 - RNA, 19 nt, Artificial Sequence
  Description of Artificial Sequence: siNA antisense
aucaucauaucccaagcca

SEQ ID NO: 1248 - RNA, 19 nt, Artificial Sequence
  Description of Artificial Sequence: siNA antisense
cgguucauccacugcacag

SEQ ID NO: 1249 - RNA, 19 nt, Artificial Sequence
  Description of Artificial Sequence: siNA antisense
caagcacagcccgcgucau

SEQ ID NO: 1250 - RNA, 19 nt, Artificial Sequence
  Description of Artificial Sequence: siNA antisense
ucaucaucauaucccaagc

SEQ ID NO: 1251 - RNA, 19 nt, Artificial Sequence
  Description of Artificial Sequence: siNA antisense
aagcacagcccgcgucaua

SEQ ID NO: 1252 - RNA, 19 nt, Artificial Sequence
  Description of Artificial Sequence: siNA antisense
ccaagcacagcccgcguca

SEQ ID NO: 1253 - RNA, 19 nt, Artificial Sequence
  Description of Artificial Sequence: siNA antisense
caucaucauaucccaagcc

SEQ ID NO: 1254 - RNA, 19 nt, Artificial Sequence
  Description of Artificial Sequence: siNA antisense
ccgguucauccacugcaca

SEQ ID NO: 1255 - RNA, 19 nt, Artificial Sequence
  Description of Artificial Sequence: siNA antisense
gguucauccacugcacagc

SEQ ID NO: 1256 - RNA, 19 nt, Artificial Sequence
  Description of Artificial Sequence: siNA antisense
uuacugcccaguugaagag

SEQ ID NO: 1257 - RNA, 19 nt, Artificial Sequence
  Description of Artificial Sequence: siNA antisense
guugucgccuuccacgagg

SEQ ID NO: 1258 - RNA, 19 nt, Artificial Sequence
  Description of Artificial Sequence: siNA antisense
cgacugucugggugacaca

SEQ ID NO: 1259 - RNA, 19 nt, Artificial Sequence
  Description of Artificial Sequence: siNA antisense
cuguugcauaguucacgcc

SEQ ID NO: 1260 - RNA, 19 nt, Artificial Sequence
  Description of Artificial Sequence: siNA antisense
uguugcauaguucacgccg

SEQ ID NO: 1261 - RNA, 19 nt, Artificial Sequence
  Description of Artificial Sequence: siNA antisense
ucgacugucugggugacac

SEQ ID NO: 1262 - RNA, 19 nt, Artificial Sequence
  Description of Artificial Sequence: siNA antisense
uacugcccaguugaagagg

SEQ ID NO: 1263 - RNA, 19 nt, Artificial Sequence
  Description of Artificial Sequence: siNA antisense
uagguugucgccuuccacg

SEQ ID NO: 1264 - RNA, 19 nt, Artificial Sequence
  Description of Artificial Sequence: siNA antisense
agguugucgccuuccacga

SEQ ID NO: 1265 - RNA, 19 nt, Artificial Sequence
  Description of Artificial Sequence: siNA antisense
uggggccccaacuaggccg

SEQ ID NO: 1266 - RNA, 19 nt, Artificial Sequence
  Description of Artificial Sequence: siNA antisense
ucggaagucuuccuagucg

SEQ ID NO: 1267 - RNA, 19 nt, Artificial Sequence
  Description of Artificial Sequence: siNA antisense
aucgaugaccuuacccaaa

SEQ ID NO: 1268 - RNA, 19 nt, Artificial Sequence
  Description of Artificial Sequence: siNA antisense
auagguugucgccuuccac

SEQ ID NO: 1269 - RNA, 19 nt, Artificial Sequence
  Description of Artificial Sequence: siNA antisense
uugucgccuuccacgaggu

SEQ ID NO: 1270 - RNA, 19 nt, Artificial Sequence
  Description of Artificial Sequence: siNA antisense
cggaagucuuccuagucgc

SEQ ID NO: 1271 - RNA, 19 nt, Artificial Sequence
  Description of Artificial Sequence: siNA antisense
guccuggaggcugcacgac

SEQ ID NO: 1272 - RNA, 19 nt, Artificial Sequence
  Description of Artificial Sequence: siNA antisense
ccgcucggaagucuuccua

SEQ ID NO: 1273 - RNA, 19 nt, Artificial Sequence
  Description of Artificial Sequence: siNA antisense
guugcauaguucacgccgu

SEQ ID NO: 1274 - RNA, 19 nt, Artificial Sequence
  Description of Artificial Sequence: siNA antisense
gguugucgccuuccacgag

SEQ ID NO: 1275 - RNA, 19 nt, Artificial Sequence
  Description of Artificial Sequence: siNA antisense
cuuccacgagguugcgacc

SEQ ID NO: 1276 - RNA, 19 nt, Artificial Sequence
  Description of Artificial Sequence: siNA antisense
uuccacgagguugcgaccg

SEQ ID NO: 1277 - RNA, 19 nt, Artificial Sequence
  Description of Artificial Sequence: siNA antisense
agucuuccuagucgcgcgc

SEQ ID NO: 1278 - RNA, 19 nt, Artificial Sequence
  Description of Artificial Sequence: siNA antisense
uugcauaguucacgccguc

SEQ ID NO: 1279 - RNA, 19 nt, Artificial Sequence
  Description of Artificial Sequence: siNA antisense
cucacaggggagugaucua

SEQ ID NO: 1280 - RNA, 19 nt, Artificial Sequence
  Description of Artificial Sequence: siNA antisense
ccacgagguugcgaccgcu

SEQ ID NO: 1281 - RNA, 19 nt, Artificial Sequence
  Description of Artificial Sequence: siNA antisense
gauagguugucgccuucca

SEQ ID NO: 1282 - RNA, 19 nt, Artificial Sequence
  Description of Artificial Sequence: siNA antisense
aagucuuccuagucgcgcg

SEQ ID NO: 1283 - RNA, 19 nt, Artificial Sequence
  Description of Artificial Sequence: siNA antisense
cgcucggaagucuuccuag

SEQ ID NO: 1284 - RNA, 19 nt, Artificial Sequence
  Description of Artificial Sequence: siNA antisense
ucuuccuagucgcgcgcac

SEQ ID NO: 1285 - RNA, 19 nt, Artificial Sequence
  Description of Artificial Sequence: siNA antisense
ccucacaggggagugaucu

SEQ ID NO: 1286 - RNA, 19 nt, Artificial Sequence
  Description of Artificial Sequence: siNA antisense
gucuuccuagucgcgcgca

SEQ ID NO: 1287 - RNA, 19 nt, Artificial Sequence
  Description of Artificial Sequence: siNA antisense
ucacaggggagugaucuau

SEQ ID NO: 1288 - RNA, 19 nt, Artificial Sequence
  Description of Artificial Sequence: siNA antisense
cacgagguugcgaccgcuc

SEQ ID NO: 1289 - RNA, 19 nt, Artificial Sequence
  Description of Artificial Sequence: siNA antisense
guuggagcagucguucgug

SEQ ID NO: 1290 - RNA, 19 nt, Artificial Sequence
  Description of Artificial Sequence: siNA antisense
cgucggcaaggaacuugcc

SEQ ID NO: 1291 - RNA, 19 nt, Artificial Sequence
  Description of Artificial Sequence: siNA antisense
gguccuggaggcugcacga

SEQ ID NO: 1292 - RNA, 19 nt, Artificial Sequence
  Description of Artificial Sequence: siNA antisense
uggagcagucguucgugac

SEQ ID NO: 1293 - RNA, 19 nt, Artificial Sequence
  Description of Artificial Sequence: siNA antisense
uccacgagguugcgaccgc

SEQ ID NO: 1294 - RNA, 19 nt, Artificial Sequence
  Description of Artificial Sequence: siNA antisense
gaagucuuccuagucgcgc

SEQ ID NO: 1295 - RNA, 19 nt, Artificial Sequence
  Description of Artificial Sequence: siNA antisense
gcacagcccgcgucauagc

SEQ ID NO: 1296 - RNA, 19 nt, Artificial Sequence
  Description of Artificial Sequence: siNA antisense
uuggagcagucguucguga

SEQ ID NO: 1297 - RNA, 19 nt, Artificial Sequence
  Description of Artificial Sequence: siNA antisense
gccuuccacgagguugcga

SEQ ID NO: 1298 - RNA, 19 nt, Artificial Sequence
  Description of Artificial Sequence: siNA antisense
ggguccuggaggcugcacg

SEQ ID NO: 1299 - RNA, 19 nt, Artificial Sequence
  Description of Artificial Sequence: siNA antisense
ccuuccacgagguugcgac

SEQ ID NO: 1300 - RNA, 19 nt, Artificial Sequence
  Description of Artificial Sequence: siNA antisense
gcucggaagucuuccuagu

SEQ ID NO: 1301 - RNA, 19 nt, Artificial Sequence
  Description of Artificial Sequence: siNA antisense
ggaagucuuccuagucgcg

SEQ ID NO: 1302 - RNA, 19 nt, Artificial Sequence
  Description of Artificial Sequence: siNA antisense
uccacaugugcuucgccca

SEQ ID NO: 1303 - RNA, 19 nt, Artificial Sequence
  Description of Artificial Sequence: siNA antisense
cauggaauaguaggcaagg

SEQ ID NO: 1304 - RNA, 19 nt, Artificial Sequence
  Description of Artificial Sequence: siNA antisense
accccaaguuuccugaggc

SEQ ID NO: 1305 - RNA, 19 nt, Artificial Sequence
  Description of Artificial Sequence: siNA antisense
cacagcccgcgucauagca

SEQ ID NO: 1306 - RNA, 19 nt, Artificial Sequence
  Description of Artificial Sequence: siNA antisense
guagcgguggcgagcacga

SEQ ID NO: 1307 - RNA, 19 nt, Artificial Sequence
  Description of Artificial Sequence: siNA antisense
ccccaaguuuccugaggca

SEQ ID NO: 1308 - RNA, 19 nt, Artificial Sequence
  Description of Artificial Sequence: siNA antisense
cggggucgggcacgagaca

SEQ ID NO: 1309 - RNA, 19 nt, Artificial Sequence
  Description of Artificial Sequence: siNA antisense
cccaucuccugccgccaca

SEQ ID NO: 1310 - RNA, 19 nt, Artificial Sequence
  Description of Artificial Sequence: siNA antisense
uagcgguggcgagcacgac

SEQ ID NO: 1311 - RNA, 19 nt, Artificial Sequence
  Description of Artificial Sequence: siNA antisense
ccgucacguaguggaaauc

SEQ ID NO: 1312 - RNA, 19 nt, Artificial Sequence
  Description of Artificial Sequence: siNA antisense
ggaauaguaggcaaggccc

SEQ ID NO: 1313 - RNA, 19 nt, Artificial Sequence
  Description of Artificial Sequence: siNA antisense
auggaauaguaggcaaggc

SEQ ID NO: 1314 - RNA, 19 nt, Artificial Sequence
  Description of Artificial Sequence: siNA antisense
cucggaagucuuccuaguc

SEQ ID NO: 1315 - RNA, 19 nt, Artificial Sequence
  Description of Artificial Sequence: siNA antisense
ugauauaugucucccccgc

SEQ ID NO: 1316 - RNA, 19 nt, Artificial Sequence
  Description of Artificial Sequence: siNA antisense
acgagguugcgaccgcucg

SEQ ID NO: 1317 - RNA, 19 nt, Artificial Sequence
  Description of Artificial Sequence: siNA antisense
uggaauaguaggcaaggcc

SEQ ID NO: 1318 - RNA, 19 nt, Artificial Sequence
  Description of Artificial Sequence: siNA antisense
cccgucacguaguggaaau

SEQ ID NO: 1319 - RNA, 19 nt, Artificial Sequence
  Description of Artificial Sequence: siNA antisense
gcccgggaacuugacgucc

SEQ ID NO: 1320 - RNA, 19 nt, Artificial Sequence
  Description of Artificial Sequence: siNA antisense
agcccgcgucauagcacuc

SEQ ID NO: 1321 - RNA, 19 nt, Artificial Sequence
  Description of Artificial Sequence: siNA antisense
cgcccgggaacuugacguc

SEQ ID NO: 1322 - RNA, 19 nt, Artificial Sequence
  Description of Artificial Sequence: siNA antisense
gaccaagacccgucgcuga

SEQ ID NO: 1323 - RNA, 19 nt, Artificial Sequence
  Description of Artificial Sequence: siNA antisense
ccaccgcccgggaacuuga

SEQ ID NO: 1324 - RNA, 19 nt, Artificial Sequence
  Description of Artificial Sequence: siNA antisense
uucgccuucaucuccuuga

SEQ ID NO: 1325 - RNA, 19 nt, Artificial Sequence
  Description of Artificial Sequence: siNA antisense
ggcgagccuuggggauagg

SEQ ID NO: 1326 - RNA, 19 nt, Artificial Sequence
  Description of Artificial Sequence: siNA antisense
ugaucugagguaggucaag

SEQ ID NO: 1327 - RNA, 19 nt, Artificial Sequence
  Description of Artificial Sequence: siNA antisense
gcccgucacguaguggaaa

SEQ ID NO: 1328 - RNA, 19 nt, Artificial Sequence
  Description of Artificial Sequence: siNA antisense
cagcccgcgucauagcacu

SEQ ID NO: 1329 - RNA, 19 nt, Artificial Sequence
  Description of Artificial Sequence: siNA antisense
ccgcccgggaacuugacgu

SEQ ID NO: 1330 - RNA, 19 nt, Artificial Sequence
  Description of Artificial Sequence: siNA antisense
cuggcccgaugucuccaga

SEQ ID NO: 1331 - RNA, 19 nt, Artificial Sequence
  Description of Artificial Sequence: siNA antisense
uuccacaugugcuucgccc

SEQ ID NO: 1332 - RNA, 19 nt, Artificial Sequence
  Description of Artificial Sequence: siNA antisense
augaucugagguaggucaa

SEQ ID NO: 1333 - RNA, 19 nt, Artificial Sequence
  Description of Artificial Sequence: siNA antisense
uccagccgucuccgcuugg

SEQ ID NO: 1334 - RNA, 19 nt, Artificial Sequence
  Description of Artificial Sequence: siNA antisense
ccagccgucuccgcuuggu

SEQ ID NO: 1335 - RNA, 19 nt, Artificial Sequence
  Description of Artificial Sequence: siNA antisense
cugaggcaugaagccaccc

SEQ ID NO: 1336 - RNA, 19 nt, Artificial Sequence
  Description of Artificial Sequence: siNA antisense
caccgcccgggaacuugac

SEQ ID NO: 1337 - RNA, 19 nt, Artificial Sequence
  Description of Artificial Sequence: siNA antisense
ucgccuucaucuccuugag

SEQ ID NO: 1338 - RNA, 19 nt, Artificial Sequence
  Description of Artificial Sequence: siNA antisense
cagccgucuccgcuugguc

SEQ ID NO: 1339 - RNA, 19 nt, Artificial Sequence
  Description of Artificial Sequence: siNA antisense
ugguugagcccgaccugga

SEQ ID NO: 1340 - RNA, 19 nt, Artificial Sequence
  Description of Artificial Sequence: siNA antisense
gaggaagauagagaaagag

SEQ ID NO: 1341 - RNA, 19 nt, Artificial Sequence
  Description of Artificial Sequence: siNA antisense
uggcccgaugucuccagac

SEQ ID NO: 1342 - RNA, 19 nt, Artificial Sequence
  Description of Artificial Sequence: siNA antisense
ucgggggccaagucacaac

SEQ ID NO: 1343 - RNA, 19 nt, Artificial Sequence
  Description of Artificial Sequence: siNA antisense
uuggacuggagccaggucu

SEQ ID NO: 1344 - RNA, 19 nt, Artificial Sequence
  Description of Artificial Sequence: siNA antisense
ccauggaauaguaggcaag

SEQ ID NO: 1345 - RNA, 19 nt, Artificial Sequence
  Description of Artificial Sequence: siNA antisense
uagagaaagagcaaccggg

SEQ ID NO: 1346 - RNA, 19 nt, Artificial Sequence
  Description of Artificial Sequence: siNA antisense
aagaggaagauagagaaag

SEQ ID NO: 1347 - RNA, 19 nt, Artificial Sequence
  Description of Artificial Sequence: siNA antisense
ugaggcaugaagccacccu

SEQ ID NO: 1348 - RNA, 19 nt, Artificial Sequence
  Description of Artificial Sequence: siNA antisense
uggacuggagccaggucuu

SEQ ID NO: 1349 - RNA, 19 nt, Artificial Sequence
  Description of Artificial Sequence: siNA antisense
auagagaaagagcaaccgg

SEQ ID NO: 1350 - RNA, 19 nt, Artificial Sequence
  Description of Artificial Sequence: siNA antisense
gauagagaaagagcaaccg

SEQ ID NO: 1351 - RNA, 19 nt, Artificial Sequence
  Description of Artificial Sequence: siNA antisense
acguaguggaaauccccca

SEQ ID NO: 1352 - RNA, 19 nt, Artificial Sequence
  Description of Artificial Sequence: siNA antisense
gagcagucguucgugacau

SEQ ID NO: 1353 - RNA, 19 nt, Artificial Sequence
  Description of Artificial Sequence: siNA antisense
guggggccccaacuaggcc

SEQ ID NO: 1354 - RNA, 19 nt, Artificial Sequence
  Description of Artificial Sequence: siNA antisense
gccgucuccgcuuggucca

SEQ ID NO: 1355 - RNA, 19 nt, Artificial Sequence
  Description of Artificial Sequence: siNA antisense
gguugagcccgaccuggaa

SEQ ID NO: 1356 - RNA, 19 nt, Artificial Sequence
  Description of Artificial Sequence: siNA antisense
accaggaacucgacccgcu

SEQ ID NO: 1357 - RNA, 19 nt, Artificial Sequence
  Description of Artificial Sequence: siNA antisense
cuucgccuucaucuccuug

SEQ ID NO: 1358 - RNA, 19 nt, Artificial Sequence
  Description of Artificial Sequence: siNA antisense
agcagucguucgugacaug

SEQ ID NO: 1359 - RNA, 19 nt, Artificial Sequence
  Description of Artificial Sequence: siNA antisense
ccaggaacucgacccgcug

SEQ ID NO: 1360 - RNA, 19 nt, Artificial Sequence
  Description of Artificial Sequence: siNA antisense
ugcccgucacguaguggaa

SEQ ID NO: 1361 - RNA, 19 nt, Artificial Sequence
  Description of Artificial Sequence: siNA antisense
gaggcaugaagccacccua

SEQ ID NO: 1362 - RNA, 19 nt, Artificial Sequence
  Description of Artificial Sequence: siNA antisense
agcaucgugcaguccugga

SEQ ID NO: 1363 - RNA, 19 nt, Artificial Sequence
  Description of Artificial Sequence: siNA antisense
augcccgucacguagugga

SEQ ID NO: 1364 - RNA, 19 nt, Artificial Sequence
  Description of Artificial Sequence: siNA antisense
ggcaugaagccacccuauu

SEQ ID NO: 1365 - RNA, 19 nt, Artificial Sequence
  Description of Artificial Sequence: siNA antisense
ucauagccuccgugaagac

SEQ ID NO: 1366 - RNA, 19 nt, Artificial Sequence
  Description of Artificial Sequence: siNA antisense
aggcaugaagccacccuau

SEQ ID NO: 1367 - RNA, 19 nt, Artificial Sequence
  Description of Artificial Sequence: siNA antisense
gucauagccuccgugaaga

SEQ ID NO: 1368 - RNA, 19 nt, Artificial Sequence
  Description of Artificial Sequence: siNA antisense
cccaaguuuccugaggcau

SEQ ID NO: 1369 - RNA, 19 nt, Artificial Sequence
  Description of Artificial Sequence: siNA antisense
uccuugagcacgucccggu

SEQ ID NO: 1370 - RNA, 19 nt, Artificial Sequence
  Description of Artificial Sequence: siNA antisense
ucauccacugcacagcccc

SEQ ID NO: 1371 - RNA, 19 nt, Artificial Sequence
  Description of Artificial Sequence: siNA antisense
ucgugcaguccuggagcuu

SEQ ID NO: 1372 - RNA, 19 nt, Artificial Sequence
  Description of Artificial Sequence: siNA antisense
caucgugcaguccuggagc

SEQ ID NO: 1373 - RNA, 19 nt, Artificial Sequence
  Description of Artificial Sequence: siNA antisense
ccuugagcacgucccggua

SEQ ID NO: 1374 - RNA, 19 nt, Artificial Sequence
  Description of Artificial Sequence: siNA antisense
uucauccacugcacagccc

SEQ ID NO: 1375 - RNA, 19 nt, Artificial Sequence
  Description of Artificial Sequence: siNA antisense
accgcccgggaacuugacg

SEQ ID NO: 1376 - RNA, 19 nt, Artificial Sequence
  Description of Artificial Sequence: siNA antisense
caugaagccacccuauuga

SEQ ID NO: 1377 - RNA, 19 nt, Artificial Sequence
  Description of Artificial Sequence: siNA antisense
cauagccuccgugaagacu

SEQ ID NO: 1378 - RNA, 19 nt, Artificial Sequence
  Description of Artificial Sequence: siNA antisense
agccgucuccgcuuggucc

SEQ ID NO: 1379 - RNA, 19 nt, Artificial Sequence
  Description of Artificial Sequence: siNA antisense
aggagcuuggacuggagcc

SEQ ID NO: 1380 - RNA, 19 nt, Artificial Sequence
  Description of Artificial Sequence: siNA antisense
guucauccacugcacagcc

SEQ ID NO: 1381 - RNA, 19 nt, Artificial Sequence
  Description of Artificial Sequence: siNA antisense
gcaucgugcaguccuggag

SEQ ID NO: 1382 - RNA, 19 nt, Artificial Sequence
  Description of Artificial Sequence: siNA antisense
auagccuccgugaagacuc

SEQ ID NO: 1383 - RNA, 19 nt, Artificial Sequence
  Description of Artificial Sequence: siNA antisense
ggagcuuggacuggagcca

SEQ ID NO: 1384 - RNA, 19 nt, Artificial Sequence
  Description of Artificial Sequence: siNA antisense
ucacguaguggaaaucccc

SEQ ID NO: 1385 - RNA, 19 nt, Artificial Sequence
  Description of Artificial Sequence: siNA antisense
ccaaguuuccugaggcaug

SEQ ID NO: 1386 - RNA, 19 nt, Artificial Sequence
  Description of Artificial Sequence: siNA antisense
augaagccacccuauugau

SEQ ID NO: 1387 - RNA, 19 nt, Artificial Sequence
  Description of Artificial Sequence: siNA antisense
aauaguaggcaaggcccgc

SEQ ID NO: 1388 - RNA, 19 nt, Artificial Sequence
  Description of Artificial Sequence: siNA antisense
cuccuugagcacgucccgg

SEQ ID NO: 1389 - RNA, 19 nt, Artificial Sequence
  Description of Artificial Sequence: siNA antisense
gcccaguuccccaccaugg

SEQ ID NO: 1390 - RNA, 19 nt, Artificial Sequence
  Description of Artificial Sequence: siNA antisense
gcaugaagccacccuauug

SEQ ID NO: 1391 - RNA, 19 nt, Artificial Sequence
  Description of Artificial Sequence: siNA antisense
aucgugcaguccuggagcu

SEQ ID NO: 1392 - RNA, 19 nt, Artificial Sequence
  Description of Artificial Sequence: siNA antisense
gaauaguaggcaaggcccg

SEQ ID NO: 1393 - RNA, 23 nt, Artificial Sequence
  Description of Artificial Sequence: siNA target
gguccuuucuuggaucaacccgc

SEQ ID NO: 1394 - RNA, 23 nt, Artificial Sequence
  Description of Artificial Sequence: siNA target
ugccccgggaggucucguagacc

SEQ ID NO: 1395 - RNA, 23 nt, Artificial Sequence
  Description of Artificial Sequence: siNA target
ugcggaaccggugaguacaccgg

SEQ ID NO: 1396 - RNA, 23 nt, Artificial Sequence
  Description of Artificial Sequence: siNA target
gcggaaccggugaguacaccgga

SEQ ID NO: 1397 - RNA, 23 nt, Artificial Sequence
  Description of Artificial Sequence: siNA target
ccuugugguacugccugauaggg

SEQ ID NO: 1398 - RNA, 23 nt, Artificial Sequence
  Description of Artificial Sequence: siNA target
cuugugguacugccugauagggu

SEQ ID NO: 1399 - RNA, 23 nt, Artificial Sequence
  Description of Artificial Sequence: siNA target
uugugguacugccugauagggug

SEQ ID NO: 1400 - RNA, 23 nt, Artificial Sequence
  Description of Artificial Sequence: siNA target
gugccccgggaggucucguagac

SEQ ID NO: 1401 - RNA, 23 nt, Artificial Sequence
  Description of Artificial Sequence: siNA target
auaguggucugcggaaccgguga

SEQ ID NO: 1402 - RNA, 23 nt, Artificial Sequence
  Description of Artificial Sequence: siNA target
gucugcggaaccggugaguacac

SEQ ID NO: 1403 - RNA, 23 nt, Artificial Sequence
  Description of Artificial Sequence: siNA target
gccuugugguacugccugauagg

SEQ ID NO: 1404 - RNA, 23 nt, Artificial Sequence
  Description of Artificial Sequence: siNA target
ugugguacugccugauagggugc

SEQ ID NO: 1405 - RNA, 23 nt, Artificial Sequence
  Description of Artificial Sequence: siNA target
gugguacugccugauagggugcu

SEQ ID NO: 1406 - RNA, 23 nt, Artificial Sequence
  Description of Artificial Sequence: siNA target
ugguacugccugauagggugcuu

SEQ ID NO: 1407 - RNA, 23 nt, Artificial Sequence
  Description of Artificial Sequence: siNA target
gguacugccugauagggugcuug

SEQ ID NO: 1408 - RNA, 23 nt, Artificial Sequence
  Description of Artificial Sequence: siNA target
uacugccugauagggugcuugcg

SEQ ID NO: 1409 - RNA, 23 nt, Artificial Sequence
  Description of Artificial Sequence: siNA target
acugccugauagggugcuugcga

SEQ ID NO: 1410 - RNA, 23 nt, Artificial Sequence
  Description of Artificial Sequence: siNA target
ugccugauagggugcuugcgagu

SEQ ID NO: 1411 - RNA, 23 nt, Artificial Sequence
  Description of Artificial Sequence: siNA target
cugauagggugcuugcgagugcc

SEQ ID NO: 1412 - RNA, 23 nt, Artificial Sequence
  Description of Artificial Sequence: siNA target
aaaggccuugugguacugccuga

SEQ ID NO: 1413 - RNA, 23 nt, Artificial Sequence
  Description of Artificial Sequence: siNA target
ggguccuuucuuggaucaacccg

SEQ ID NO: 1414 - RNA, 23 nt, Artificial Sequence
  Description of Artificial Sequence: siNA target
cggguccuuucuuggaucaaccc

SEQ ID NO: 1415 - RNA, 23 nt, Artificial Sequence
  Description of Artificial Sequence: siNA target
gaccggguccuuucuuggaucaa

SEQ ID NO: 1416 - RNA, 23 nt, Artificial Sequence
  Description of Artificial Sequence: siNA target
gccccgggaggucucguagaccg

SEQ ID NO: 1417 - RNA, 23 nt, Artificial Sequence
  Description of Artificial Sequence: siNA target
ccccgggaggucucguagaccgu

SEQ ID NO: 1418 - RNA, 23 nt, Artificial Sequence
  Description of Artificial Sequence: siNA target
cccgggaggucucguagaccgug

SEQ ID NO: 1419 - RNA, 23 nt, Artificial Sequence
  Description of Artificial Sequence: siNA target
ccgggaggucucguagaccgugc

SEQ ID NO: 1420 - RNA, 23 nt, Artificial Sequence
  Description of Artificial Sequence: siNA target
ucccgggagagccauaguggucu

SEQ ID NO: 1421 - RNA, 23 nt, Artificial Sequence
  Description of Artificial Sequence: siNA target
cccgggagagccauaguggucug

SEQ ID NO: 1422 - RNA, 23 nt, Artificial Sequence
  Description of Artificial Sequence: siNA target
ccgggagagccauaguggucugc

SEQ ID NO: 1423 - RNA, 23 nt, Artificial Sequence
  Description of Artificial Sequence: siNA target
uaguggucugcggaaccggugag

SEQ ID NO: 1424 - RNA, 23 nt, Artificial Sequence
  Description of Artificial Sequence: siNA target
aguggucugcggaaccggugagu

SEQ ID NO: 1425 - RNA, 23 nt, Artificial Sequence
  Description of Artificial Sequence: siNA target
guggucugcggaaccggugagua

SEQ ID NO: 1426 - RNA, 23 nt, Artificial Sequence
  Description of Artificial Sequence: siNA target
uggucugcggaaccggugaguac

SEQ ID NO: 1427 - RNA, 23 nt, Artificial Sequence
  Description of Artificial Sequence: siNA target
ggucugcggaaccggugaguaca

SEQ ID NO: 1428 - RNA, 23 nt, Artificial Sequence
  Description of Artificial Sequence: siNA target
ucugcggaaccggugaguacacc

SEQ ID NO: 1429 - RNA, 23 nt, Artificial Sequence
  Description of Artificial Sequence: siNA target
cugcggaaccggugaguacaccg

SEQ ID NO: 1430 - RNA, 23 nt, Artificial Sequence
  Description of Artificial Sequence: siNA target
cggaaccggugaguacaccggaa

SEQ ID NO: 1431 - RNA, 23 nt, Artificial Sequence
  Description of Artificial Sequence: siNA target
ggaaccggugaguacaccggaau

SEQ ID NO: 1432 - RNA, 23 nt, Artificial Sequence
  Description of Artificial Sequence: siNA target
gaaccggugaguacaccggaauu

SEQ ID NO: 1433 - RNA, 23 nt, Artificial Sequence
  Description of Artificial Sequence: siNA target
aaccggugaguacaccggaauug

SEQ ID NO: 1434 - RNA, 23 nt, Artificial Sequence
  Description of Artificial Sequence: siNA target
ucgcgaaaggccuugugguacug

SEQ ID NO: 1435 - RNA, 23 nt, Artificial Sequence
  Description of Artificial Sequence: siNA target
cgcgaaaggccuugugguacugc

SEQ ID NO: 1436 - RNA, 23 nt, Artificial Sequence
  Description of Artificial Sequence: siNA target
gcgaaaggccuugugguacugcc

SEQ ID NO: 1437 - RNA, 23 nt, Artificial Sequence
  Description of Artificial Sequence: siNA target
cgaaaggccuugugguacugccu

SEQ ID NO: 1438 - RNA, 23 nt, Artificial Sequence
  Description of Artificial Sequence: siNA target
gaaaggccuugugguacugccug

SEQ ID NO: 1439 - RNA, 23 nt, Artificial Sequence
  Description of Artificial Sequence: siNA target
aaggccuugugguacugccugau

SEQ ID NO: 1440 - RNA, 23 nt, Artificial Sequence
  Description of Artificial Sequence: siNA target
aggccuugugguacugccugaua

SEQ ID NO: 1441 - RNA, 23 nt, Artificial Sequence
  Description of Artificial Sequence: siNA target
ggccuugugguacugccugauag

SEQ ID NO: 1442 - RNA, 23 nt, Artificial Sequence
  Description of Artificial Sequence: siNA target
guacugccugauagggugcuugc

SEQ ID NO: 1443 - RNA, 23 nt, Artificial Sequence
  Description of Artificial Sequence: siNA target
cugccugauagggugcuugcgag

SEQ ID NO: 1444 - RNA, 23 nt, Artificial Sequence
  Description of Artificial Sequence: siNA target
gccugauagggugcuugcgagug

SEQ ID NO: 1445 - RNA, 23 nt, Artificial Sequence
  Description of Artificial Sequence: siNA target
ccugauagggugcuugcgagugc

SEQ ID NO: 1446 - RNA, 23 nt, Artificial Sequence
  Description of Artificial Sequence: siNA target
ugauagggugcuugcgagugccc

SEQ ID NO: 1447 - RNA, 23 nt, Artificial Sequence
  Description of Artificial Sequence: siNA target
gauagggugcuugcgagugcccc

SEQ ID NO: 1448 - RNA, 23 nt, Artificial Sequence
  Description of Artificial Sequence: siNA target
uagggugcuugcgagugccccgg

SEQ ID NO: 1449 - RNA, 23 nt, Artificial Sequence
  Description of Artificial Sequence: siNA target
agggugcuugcgagugccccggg

SEQ ID NO: 1450 - RNA, 23 nt, Artificial Sequence
  Description of Artificial Sequence: siNA target
gugcuugcgagugccccgggagg

SEQ ID NO: 1451 - RNA, 23 nt, Artificial Sequence
  Description of Artificial Sequence: siNA target
ugcuugcgagugccccgggaggu

SEQ ID NO: 1452 - RNA, 23 nt, Artificial Sequence
  Description of Artificial Sequence: siNA target
gcuugcgagugccccgggagguc

SEQ ID NO: 1453 - RNA, 23 nt, Artificial Sequence
  Description of Artificial Sequence: siNA target
cuugcgagugccccgggaggucu

SEQ ID NO: 1454 - RNA, 23 nt, Artificial Sequence
  Description of Artificial Sequence: siNA target
uugcgagugccccgggaggucuc

SEQ ID NO: 1455 - RNA, 23 nt, Artificial Sequence
  Description of Artificial Sequence: siNA target
ugcgagugccccgggaggucucg

SEQ ID NO: 1456 - RNA, 23 nt, Artificial Sequence
  Description of Artificial Sequence: siNA target
gcgagugccccgggaggucucgu

SEQ ID NO: 1457 - RNA, 23 nt, Artificial Sequence
  Description of Artificial Sequence: siNA target
gagugccccgggaggucucguag

SEQ ID NO: 1458 - RNA, 23 nt, Artificial Sequence
  Description of Artificial Sequence: siNA target
agugccccgggaggucucguaga

SEQ ID NO: 1459 - RNA, 23 nt, Artificial Sequence
  Description of Artificial Sequence: siNA target
cgggaggucucguagaccgugca

SEQ ID NO: 1460 - RNA, 23 nt, Artificial Sequence
  Description of Artificial Sequence: siNA target
uagccauggcguuaguaugagug

SEQ ID NO: 1461 - RNA, 23 nt, Artificial Sequence
  Description of Artificial Sequence: siNA target
cccucccgggagagccauagugg

SEQ ID NO: 1462 - RNA, 46 nt, Artificial Sequence
  Description of Artificial Sequence: siNA target
ccccgggaggucucguagaccguucgcgaaaggccuugugguacug

SEQ ID NO: 1463 - RNA, 46 nt, Artificial Sequence
  Description of Artificial Sequence: siNA target
ccccgggaggucucguagaccguugauagggugcuugcgagugccc

SEQ ID NO: 1464 - RNA, 46 nt, Artificial Sequence
  Description of Artificial Sequence: siNA target
ugauagggugcuugcgagugcccucgcgaaaggccuugugguacug

SEQ ID NO: 1465 - RNA, 46 nt, Artificial Sequence
  Description of Artificial Sequence: siNA target
ccccgggaggucucguagaccgugccugauagggugcuugcgagug

SEQ ID NO: 1466 - RNA, 46 nt, Artificial Sequence
  Description of Artificial Sequence: siNA target
gccugauagggugcuugcgagugucgcgaaaggccuugugguacug

SEQ ID NO: 1467 - RNA, 21 nt, Artificial Sequence
  Description of Artificial Sequence: siNA sense
  misc_feature (1)..(1): 5'-3 attached terminal deoxyabasic moiety
  misc_feature (21)..(21): 3'-3 attached terminal deoxyabasic moiety
gguccuuucuuggaucaaccc

SEQ ID NO: 1468 - RNA, 21 nt, Artificial Sequence
  Description of Artificial Sequence: siNA antisense
  misc_feature (1)..(1): 5'-3 attached terminal deoxyabasic moiety
  misc_feature (21)..(21): 3'-3 attached terminal deoxyabasic moiety
ggguugauccaagaaaggacc

SEQ ID NO: 1469 - RNA, 21 nt, Artificial Sequence
  Description of Artificial Sequence: siNA sense
  misc_feature (1)..(1): 5'-3 attached terminal deoxyabasic moiety
  misc_feature (21)..(21): 3'-3 attached terminal deoxyabasic moiety
cccaacuagguucuuuccugg

SEQ ID NO: 1470 - RNA, 21 nt, Artificial Sequence
  Description of Artificial Sequence: siNA sense
  misc_feature (1)..(1): 5'-3 attached terminal deoxyabasic moiety
  misc_feature (21)..(21): 3'-3 attached terminal deoxyabasic moiety
ccaggaaagaaccuaguuggg

SEQ ID NO: 1471 - RNA, 23 nt, Artificial Sequence
  Description of Artificial Sequence: siNA sense
gguccuuucuuggaucaacccuu

SEQ ID NO: 1472 - RNA, 23 nt, Artificial Sequence
  Description of Artificial Sequence: siNA antisense
ggguugauccaagaaaggaccuu

SEQ ID NO: 1473 - RNA, 23 nt, Artificial Sequence
  Description of Artificial Sequence: siNA sense
  misc_feature (1)..(1): 5'-3 attached terminal deoxyabasic moiety
  misc_feature (21)..(21): 3'-3 attached terminal deoxyabasic moiety
gguccuuucuuggaucaacccuu

SEQ ID NO: 1474 - RNA, 23 nt, Artificial Sequence
  Description of Artificial Sequence: siNA antisense
  misc_feature (1)..(1): 5'-3 attached terminal deoxyabasic moiety
  misc_feature (23)..(23): 3'-3 attached terminal deoxyabasic moiety
ggguugauccaagaaaggaccuu

SEQ ID NO: 1475 - RNA, 21 nt, Artificial Sequence
  Description of Artificial Sequence: siNA sense
  misc_feature (20)..(21): n is thymidine
ccccgggaggucucguagann

SEQ ID NO: 1476 - RNA, 21 nt, Artificial Sequence
  Description of Artificial Sequence: siNA sense
  misc_feature (20)..(21): n is thymidine
cggaaccggugaguacaccnn

SEQ ID NO: 1477 - RNA, 21 nt, Artificial Sequence
  Description of Artificial Sequence: siNA sense
  misc_feature (20)..(21): n is thymidine
gccccgggaggucucguagnn

SEQ ID NO: 1478 - RNA, 21 nt, Artificial Sequence
  Description of Artificial Sequence: siNA sense
  misc_feature (20)..(21): n is thymidine
ggaaccggugaguacaccgnn

SEQ ID NO: 1479 - RNA, 21 nt, Artificial Sequence
  Description of Artificial Sequence: siNA sense
  misc_feature (20)..(21): n is thymidine
gugguacugccugauagggnn

SEQ ID NO: 1480 - RNA, 21 nt, Artificial Sequence
  Description of Artificial Sequence: siNA sense
  misc_feature (20)..(21): n is thymidine
ugugguacugccugauaggnn

SEQ ID NO: 1481 - RNA, 21 nt, Artificial Sequence
  Description of Artificial Sequence: siNA sense
  misc_feature (20)..(21): n is thymidine
uugugguacugccugauagnn

SEQ ID NO: 1482 - RNA, 21 nt, Artificial Sequence
  Description of Artificial Sequence: siNA antisense
  misc_feature (20)..(21): n is thymidine
ucuacgagaccucccggggnn

SEQ ID NO: 1483 - RNA, 21 nt, Artificial Sequence
  Description of Artificial Sequence: siNA antisense
  misc_feature (20)..(21): n is thymidine
gguguacucaccgguuccgnn

SEQ ID NO: 1484 - RNA, 21 nt, Artificial Sequence
  Description of Artificial Sequence: siNA antisense
  misc_feature (20)..(21): n is thymidine
cuacgagaccucccggggcnn

SEQ ID NO: 1485 - RNA, 21 nt, Artificial Sequence
  Description of Artificial Sequence: siNA antisense
  misc_feature (20)..(21): n is thymidine
cgguguacucaccgguuccnn

SEQ ID NO: 1486 - RNA, 21 nt, Artificial Sequence
  Description of Artificial Sequence: siNA antisense
  misc_feature (20)..(21): n is thymidine
cccuaucaggcaguaccacnn

SEQ ID NO: 1487 - RNA, 21 nt, Artificial Sequence
  Description of Artificial Sequence: siNA antisense
  misc_feature (20)..(21): n is thymidine
ccuaucaggcaguaccacann

SEQ ID NO: 1488 - RNA, 21 nt, Artificial Sequence
  Description of Artificial Sequence: siNA antisense
  misc_feature (20)..(21): n is thymidine
cuaucaggcaguaccacaann

SEQ ID NO: 1489 - RNA, 21 nt, Artificial Sequence
  Description of Artificial Sequence: siNA sense
  misc_feature (1)..(2): n is thymidine
nnagaugcucuggagggcccc

SEQ ID NO: 1490 - RNA, 21 nt, Artificial Sequence
  Description of Artificial Sequence: siNA sense
  misc_feature (1)..(2): n is thymidine
nnccacaugaguggccaaggc

SEQ ID NO: 1491 - RNA, 21 nt, Artificial Sequence
  Description of Artificial Sequence: siNA sense
  misc_feature (1)..(2): n is thymidine
nngaugcucuggagggccccg

SEQ ID NO: 1492 - RNA, 21 nt, Artificial Sequence
  Description of Artificial Sequence: siNA sense
  misc_feature (1)..(2): n is thymidine
nngccacaugaguggccaagg

SEQ ID NO: 1493 - RNA, 21 nt, Artificial Sequence
  Description of Artificial Sequence: siNA sense
  misc_feature (1)..(2): n is thymidine
nngggauaguccgucauggug

SEQ ID NO: 1494 - RNA, 21 nt, Artificial Sequence
  Description of Artificial Sequence: siNA sense
  misc_feature (1)..(2): n is thymidine
nnggauaguccgucauggugu

SEQ ID NO: 1495 - RNA, 21 nt, Artificial Sequence
  Description of Artificial Sequence: siNA sense
  misc_feature (1)..(2): n is thymidine
nngauaguccgucaugguguu

SEQ ID NO: 1496 - RNA, 21 nt, Artificial Sequence
  Description of Artificial Sequence: siNA antisense
  misc_feature (1)..(2): n is thymidine
nnggggcccuccagagcaucu

SEQ ID NO: 1497 - RNA, 21 nt, Artificial Sequence
  Description of Artificial Sequence: siNA antisense
  misc_feature (1)..(2): n is thymidine
nngccuuggccacucaugugg

SEQ ID NO: 1498 - RNA, 21 nt, Artificial Sequence
  Description of Artificial Sequence: siNA antisense
  misc_feature (1)..(2): n is thymidine
nncggggcccuccagagcauc

SEQ ID NO: 1499 - RNA, 21 nt, Artificial Sequence
  Description of Artificial Sequence: siNA antisense
  misc_feature (1)..(2): n is thymidine
nnccuuggccacucauguggc

SEQ ID NO: 1500 - RNA, 21 nt, Artificial Sequence
  Description of Artificial Sequence: siNA antisense
  misc_feature (1)..(2): n is thymidine
nncaccaugacggacuauccc

SEQ ID NO: 1501 - RNA, 21 nt, Artificial Sequence
  Description of Artificial Sequence: siNA antisense
  misc_feature (1)..(2): n is thymidine
nnacaccaugacggacuaucc

SEQ ID NO: 1502 - RNA, 21 nt, Artificial Sequence
  Description of Artificial Sequence: siNA antisense
  misc_feature (1)..(2): n is thymidine
nnaacaccaugacggacuauc

SEQ ID NO: 1503 - RNA, 21 nt, Artificial Sequence
  Description of Artificial Sequence: siNA sense
cggaaccggugaguacaccgg

SEQ ID NO: 1504 - RNA, 21 nt, Artificial Sequence
  Description of Artificial Sequence: siNA sense
ggaaccggugaguacaccgga

SEQ ID NO: 1505 - RNA, 21 nt, Artificial Sequence
  Description of Artificial Sequence: siNA sense
uugugguacugccugauaggg

SEQ ID NO: 1506 - RNA, 21 nt, Artificial Sequence
  Description of Artificial Sequence: siNA sense
ugugguacugccugauagggu

SEQ ID NO: 1507 - RNA, 21 nt, Artificial Sequence
  Description of Artificial Sequence: siNA sense
gugguacugccugauagggug

SEQ ID NO: 1508 - RNA, 21 nt, Artificial Sequence
  Description of Artificial Sequence: siNA sense
gccccgggaggucucguagac

SEQ ID NO: 1509 - RNA, 21 nt, Artificial Sequence
  Description of Artificial Sequence: siNA sense
ccccgggaggucucguagacc

SEQ ID NO: 1510 - RNA, 21 nt, Artificial Sequence
  Description of Artificial Sequence: siNA antisense
gguguacucaccgguuccgca

SEQ ID NO: 1511 - RNA, 21 nt, Artificial Sequence
  Description of Artificial Sequence: siNA antisense
cgguguacucaccgguuccgc

SEQ ID NO: 1512 - RNA, 21 nt, Artificial Sequence
  Description of Artificial Sequence: siNA antisense
cuaucaggcaguaccacaagg

SEQ ID NO: 1513 - RNA, 21 nt, Artificial Sequence
  Description of Artificial Sequence: siNA antisense
ccuaucaggcaguaccacaag

SEQ ID NO: 1514 - RNA, 21 nt, Artificial Sequence
  Description of Artificial Sequence: siNA antisense
cccuaucaggcaguaccacaa

SEQ ID NO: 1515 - RNA, 21 nt, Artificial Sequence
  Description of Artificial Sequence: siNA antisense
cuacgagaccucccggggcac

SEQ ID NO: 1516 - RNA, 21 nt, Artificial Sequence
  Description of Artificial Sequence: siNA antisense
ucuacgagaccucccggggca

SEQ ID NO: 1517 - RNA, 21 nt, Artificial Sequence
  Description of Artificial Sequence: siNA sense
ggccacaugaguggccaaggc

SEQ ID NO: 1518 - RNA, 21 nt, Artificial Sequence
  Description of Artificial Sequence: siNA sense
aggccacaugaguggccaagg

SEQ ID NO: 1519 - RNA, 21 nt, Artificial Sequence
  Description of Artificial Sequence: siNA sense
gggauaguccgucaugguguu

SEQ ID NO: 1520 - RNA, 21 nt, Artificial Sequence
  Description of Artificial Sequence: siNA sense
ugggauaguccgucauggugu

SEQ ID NO: 1521 - RNA, 21 nt, Artificial Sequence
  Description of Artificial Sequence: siNA sense
gugggauaguccgucauggug

SEQ ID NO: 1522 - RNA, 21 nt, Artificial Sequence
  Description of Artificial Sequence: siNA sense
cagaugcucuggagggccccg

SEQ ID NO: 1523 - RNA, 21 nt, Artificial Sequence
  Description of Artificial Sequence: siNA sense
ccagaugcucuggagggcccc

SEQ ID NO: 1524 - RNA, 21 nt, Artificial Sequence
  Description of Artificial Sequence: siNA antisense
acgccuuggccacucaugugg

SEQ ID NO: 1525 - RNA, 21 nt, Artificial Sequence
  Description of Artificial Sequence: siNA antisense
cgccuuggccacucauguggc

SEQ ID NO: 1526 - RNA, 21 nt, Artificial Sequence
  Description of Artificial Sequence: siNA antisense
ggaacaccaugacggacuauc

SEQ ID NO: 1527 - RNA, 21 nt, Artificial Sequence
  Description of Artificial Sequence: siNA antisense
gaacaccaugacggacuaucc

SEQ ID NO: 1528 - RNA, 21 nt, Artificial Sequence
  Description of Artificial Sequence: siNA antisense
aacaccaugacggacuauccc

SEQ ID NO: 1529 - RNA, 21 nt, Artificial Sequence
  Description of Artificial Sequence: siNA antisense
cacggggcccuccagagcauc

SEQ ID NO: 1530 - RNA, 21 nt, Artificial Sequence
  Description of Artificial Sequence: siNA antisense
acggggcccuccagagcaucu

SEQ ID NO: 1531 - RNA, 21 nt, Artificial Sequence
  Description of Artificial Sequence: siNA sense
  misc_feature (1)..(1): 5'-3 attached terminal deoxyabasic moiety
  misc_feature (1)..(6): internucleotide phosphorothioate linkages
  misc_feature (20)..(20): n is thymidine
  misc_feature (21)..(21): 3'-3 attached terminal deoxyabasic moiety
ccccgggaggucucguagann

SEQ ID NO: 1532 - RNA, 21 nt, Artificial Sequence
  Description of Artificial Sequence: siNA sense
  misc_feature (1)..(1): 5'-3 attached terminal deoxyabasic moiety
  misc_feature (1)..(6): internucleotide phosphorothioate linkages
  misc_feature (20)..(20): n is thymidine
  misc_feature (21)..(21): 3'-3 attached terminal deoxyabasic moiety
agaugcucuggagggccccnn

SEQ ID NO: 1533 - RNA, 21 nt, Artificial Sequence
  Description of Artificial Sequence: siNA antisense
  misc_feature (1)..(6): internucleotide phosphorothioate linkage
  misc_feature (20)..(20): n is thymidine
  misc_feature (21)..(21): 3'-3 attached terminal deoxyabasic moiety
ucuacgagaccucccggggnn

SEQ ID NO: 1534 - RNA, 21 nt, Artificial Sequence
  Description of Artificial Sequence: siNA antisense
  misc_feature (1)..(6): internucleotide phosphorothioate linkages
  misc_feature (20)..(20): n is thymidine
  misc_feature (21)..(21): 3'-3 attached terminal deoxyabasic moiety
ggggcccuccagagcaucunn

SEQ ID NO: 1535 - RNA, 21 nt, Artificial Sequence
  Description of Artificial Sequence: siNA sense
  misc_feature (1)..(1): 5'-3 attached terminal deoxyabasic moiety
  misc_feature (1)..(5): internucleotide phosphorothioate linkages
  misc_feature (11)..(14): internucleotide phosphorothioate linkages
  misc_feature (16)..(17): internucleotide phosphorothioate linkage
  misc_feature (20)..(20): n is thymidine
  misc_feature (21)..(21): 3'-3 attached terminal deoxyabasic moiety
ccccgggaggucucguagann

SEQ ID NO: 1536 - RNA, 21 nt, Artificial Sequence
  Description of Artificial Sequence: siNA sense
  misc_feature (1)..(1): 5'-3 attached terminal deoxyabasic moiety
  misc_feature (4)..(5): internucleotide phosphorothioate linkage
  misc_feature (6)..(10): internucleotide phosphorothioate linkages
  misc_feature (16)..(20): internucleotide phosphorothioate linkages
  misc_feature (21)..(21): 3'-3 attached terminal deoxyabasic moiety
agaugcucuggagggccccnn

SEQ ID NO: 1537 - RNA, 21 nt, Artificial Sequence
  Description of Artificial Sequence: siNA antisense
  misc_feature (1)..(4): internucleotide phosphorothioate linkages
  misc_feature (5)..(6): internucleotide phosphorothioate linkage
  misc_feature (11)..(17): internucleotide phosphorothioate linkages
  misc_feature (20)..(20): n is thymidine
  misc_feature (21)..(21): 3'-3 attached terminal deoxyabasic moiety
ucuacgagaccucccggggnn

SEQ ID NO: 1538 - RNA, 21 nt, Artificial Sequence
  Description of Artificial Sequence: siNA antisense
  misc_feature (5)..(11): internucleotide phosphorothioate linkage
  misc_feature (15)..(16): internucleotide phosphorothioate linkage
  misc_feature (17)..(20): internucleotide phosphorothioate linkage
  misc_feature (21)..(21): 3'-3 attached terminal deoxyabasic moiety
  misc_feature (21)..(21): 3'-3 attached terminal deoxyabasic moiety
ggggcccuccagagcaucunn

SEQ ID NO: 1539 - RNA, 21 nt, Artificial Sequence
  Description of Artificial Sequence: siNA sense
  misc_feature (1)..(1): 5'-3 attached terminal deoxyabasic moiety
  misc_feature (1)..(5): internucleotide phosphorothioate linkage
  misc_feature (1)..(4): 2'-deoxy-2'-fluoro
  misc_feature (11)..(14): 2'-deoxy-2'-fluoro
  misc_feature (16)..(16): 2'-deoxy-2'-fluoro
  misc_feature (17)..(20): internucleotide phosphorothioate linkage
  misc_feature (21)..(21): 3'-3 attached terminal deoxyabasic moiety
ccccgggaggucucguagann

SEQ ID NO: 1540 - RNA, 21 nt, Artificial Sequence
  Description of Artificial Sequence: siNA sense
  misc_feature (1)..(1): 5'-3 attached terminal deoxyabasic moiety
  misc_feature (1)..(5): internucleotide phosphorothioate linkage
  misc_feature (4)..(4): 2'-deoxy-2'-fluoro
  misc_feature (6)..(9): 2'-deoxy-2'-fluoro
  misc_feature (16)..(19): 2'-deoxy-2'-fluoro
  misc_feature (17)..(20): internucleotide phosphorothioate linkage
  misc_feature (21)..(21): 3'-3 attached terminal deoxyabasic moiety
agaugcucuggagggccccnn

SEQ ID NO: 1541 - RNA, 21 nt, Artificial Sequence
  Description of Artificial Sequence: siNA sense
  misc_feature (1)..(1): 5'-3 attached terminal deoxyabasic moiety
  misc_feature (1)..(4): 2'-deoxy-2'-fluoro
  misc_feature (11)..(14): 2'-deoxy-2'-fluoro
  misc_feature (16)..(16): 2'-deoxy-2'-fluoro
  misc_feature (20)..(20): n is thymidine
  misc_feature (21)..(21): 3'-3 attached terminal deoxyabasic moiety
ccccgggaggucucguagann

SEQ ID NO: 1542 - RNA, 21 nt, Artificial Sequence
  Description of Artificial Sequence: siNA sense
  misc_feature (1)..(1): 5'-3 attached terminal deoxyabasic moiety
  misc_feature (4)..(4): 2'-deoxy-2'-fluoro
  misc_feature (6)..(9): 2'-deoxy-2'-fluoro
  misc_feature (16)..(19): 2'-deoxy-2'-fluoro
  misc_feature (20)..(20): n is thymidine
  misc_feature (21)..(21): 5'-3 attached terminal deoxyabasic moiety
agaugcucuggagggccccnn

SEQ ID NO: 1543 - RNA, 21 nt, Artificial Sequence
  Description of Artificial Sequence: siNA antisense
  misc_feature (1)..(1): 5'-3 attached terminal deoxyabasic moiety
  misc_feature (1)..(4): internucleotide phosphorothioate linkage
  misc_feature (5)..(6): internucleotide phosphorothioate linkage
  misc_feature (10)..(17): internucleotide phosphorothioate linkage
  misc_feature (20)..(20): n is thymidine
  misc_feature (21)..(21): 3'-3 attached terminal deoxyabasic moiety
ucuacgagaccucccggggnn

SEQ ID NO: 1544 - RNA, 19 nt, Artificial Sequence
  Description of Artificial Sequence: siNA antisense
  misc_feature (1)..(3): 2'-deoxy-2'-fluoro
  misc_feature (5)..(5): 2'-deoxy-2'-fluoro
  misc_feature (10)..(15): 2'-deoxy-2'-fluoro
ucuacgagaccucccgggg

SEQ ID NO: 1545 - RNA, 21 nt, Artificial Sequence
  Description of Artificial Sequence: siNA antisense
  misc_feature (1)..(3): 2'-deoxy-2'-fluoro
  misc_feature (5)..(5): 2'-deoxy-2'-fluoro
  misc_feature (10)..(15): 2'-deoxy-2'-fluoro
  misc_feature (20)..(21): n is thymidine
ucuacgagaccucccggggnn

SEQ ID NO: 1546 - RNA, 21 nt, Artificial Sequence
  Description of Artificial Sequence: siNA antisense
  misc_feature (5)..(10): 2'-deoxy-2'-fluoro
  misc_feature (15)..(15): 2'-deoxy-2'-fluoro
  misc_feature (17)..(19): 2'-deoxy-2'-fluoro
  misc_feature (20)..(21): n is thymidine
ggggcccuccagagcaucunn

SEQ ID NO: 1547 - RNA, 21 nt, Artificial Sequence
  Description of Artificial Sequence: siNA antisense
  misc_feature (1)..(1): 5'-3 attached terminal deoxyabasic moiety
  misc_feature (1)..(3): 2'-deoxy-2'-fluoro
  misc_feature (5)..(5): 2'-deoxy-2'-fluoro
  misc_feature (10)..(15): 2'-deoxy-2'-fluoro
  misc_feature (20)..(20): n is thymidine
  misc_feature (21)..(21): 3'-3 attached terminal deoxyabasic moiety
ucuacgagaccucccggggnn

SEQ ID NO: 1548 - RNA, 21 nt, Artificial Sequence
  Description of Artificial Sequence: siNA sense
  misc_feature (1)..(5): internucleotide phosphorothioate linkage
  misc_feature (11)..(15): internucleotide phosphorothioate linkage
  misc_feature (16)..(17): internucleotide phosphorothioate linkage
  misc_feature (20)..(20): n is thymidine
  misc_feature (21)..(21): 3'-3 attached terminal deoxyabasic moiety
ccccgggaggucucguagann

SEQ ID NO: 1549 - RNA, 21 nt, Artificial Sequence
  Description of Artificial Sequence: siNA sense
  misc_feature (21)..(21): 3'-3 attached terminal deoxyabasic moiety
ccccgggaggucucguagacc

SEQ ID NO: 1550 - RNA, 21 nt, Artificial Sequence
  Description of Artificial Sequence: siNA sense
  misc_feature (1)..(1): 5'-3 attached terminal deoxyabasic moiety
  misc_feature (21)..(21): 3'-3 attached terminal deoxyabasic moiety
ccccgggaggucucguagacc

SEQ ID NO: 1551 - RNA, 21 nt, Artificial Sequence
  Description of Artificial Sequence: siNA antisense
  misc_feature (21)..(21): 3'-3 attached terminal deoxyabasic moiety
ucuacgagaccucccggggca

SEQ ID NO: 1552 - RNA, 21 nt, Artificial Sequence
  Description of Artificial Sequence: siNA antisense
  misc_feature (1)..(1): 5'-3 attached terminal deoxyabasic moiety
  misc_feature (21)..(21): 3'-3 attached terminal deoxyabasic moiety
ucuacgagaccucccggggca

SEQ ID NO: 1553 - RNA, 21 nt, Artificial Sequence
  Description of Artificial Sequence: siNA sense
  misc_feature (1)..(1): 5'-3 attached terminal deoxyabasic moiety
  misc_feature (1)..(4): 2'-deoxy-2'-fluoro
  misc_feature (11)..(14): 2'-deoxy-2'-fluoro
  misc_feature (16)..(16): 2'-deoxy-2'-fluoro
  misc_feature (20)..(20): n is thymidine
  misc_feature (21)..(21): 3'-3 attached terminal deoxyabasic moiety
ccccgggaggucucguagann

SEQ ID NO: 1554 - RNA, 21 nt, Artificial Sequence
  Description of Artificial Sequence: siNA antisense
  misc_feature (1)..(3): 2'-deoxy-2'-fluoro
  misc_feature (5)..(5): 2'-deoxy-2'-fluoro
  misc_feature (10)..(15): 2'-deoxy-2'-fluoro
  misc_feature (20)..(21): internucleotide phosphorothioate linkage
ucuacgagaccucccggggnn

SEQ ID NO: 1555 - RNA, 21 nt, Artificial Sequence
  Description of Artificial Sequence: siNA sense
  misc_feature (1)..(1): 5'-3 attached terminal deoxyabasic moiety
  misc_feature (1)..(2): 2'-deoxy
  misc_feature (3)..(3): 2'-deoxy-2'-fluoro
  misc_feature (4)..(5): 2'-deoxy
  misc_feature (6)..(8): 2'-deoxy-2'-fluoro
  misc_feature (9)..(9): 2'-deoxy
  misc_feature (10)..(10): 2'-deoxy-2'-fluoro
  misc_feature (11)..(14): 2'-deoxy
  misc_feature (15)..(16): 2'-deoxy-2'-fluoro
  misc_feature (17)..(18): 2'-deoxy
  misc_feature (19)..(19): 2'-deoxy-2'-fluoro
  misc_feature (20)..(20): n is thymidine
  misc_feature (21)..(21): 3'-3 attached terminal deoxyabasic moiety
aguggucugcggaaccggunn

SEQ ID NO: 1556 - RNA, 21 nt, Artificial Sequence
  Description of Artificial Sequence: siNA sense
  misc_feature (1)..(1): 5'-3 attached terminal deoxyabasic moiety
  misc_feature (1)..(2): 2'-deoxy-2'-fluoro
  misc_feature (3)..(3): 2'-deoxy
  misc_feature (4)..(4): 2'-deoxy-2'-fluoro
  misc_feature (5)..(8): 2'-deoxy
  misc_feature (9)..(10): 2'-deoxy-2'-fluoro
  misc_feature (11)..(12): 2'-deoxy
  misc_feature (13)..(13): 2'-deoxy-2'-fluoro
  misc_feature (14)..(16): 2'-deoxy
  misc_feature (17)..(17): 2'-deoxy-2'-fluoro
  misc_feature (18)..(18): 2'-deoxy
  misc_feature (19)..(19): 2'-deoxy-2'-fluoro
  misc_feature (20)..(20): n is thymidine
  misc_feature (21)..(21): 3'-3 attached terminal deoxyabasic moiety
cugcggaaccggugaguacnn

SEQ ID NO: 1557 - RNA, 21 nt, Artificial Sequence
  Description of Artificial Sequence: siNA sense
  misc_feature (1)..(1): 5'-3 attached terminal deoxyabasic moiety
  misc_feature (1)..(3): 2'-deoxy-2'-fluoro
  misc_feature (4)..(4): 2'-deoxy
  misc_feature (5)..(5): 2'-deoxy-2'-fluoro
  misc_feature (6)..(7): 2'-deoxy
  misc_feature (8)..(8): 2'-deoxy-2'-fluoro
  misc_feature (9)..(9): 2'-deoxy
  misc_feature (10)..(11): 2'-deoxy-2'-fluoro
  misc_feature (12)..(12): 2'-deoxy
  misc_feature (13)..(15): 2'-deoxy-2'-fluoro
  misc_feature (16)..(17): 2'-deoxy
  misc_feature (18)..(18): 2'-deoxy-2'-fluoro
  misc_feature (19)..(19): 2'-deoxy
  misc_feature (20)..(20): n is thymidine
  misc_feature (21)..(21): 3'-3 attached terminal deoxyabasic moiety
cuugugguacugccugauann

SEQ ID NO: 1558 - RNA, 21 nt, Artificial Sequence
  Description of Artificial Sequence: siNA sense
  misc_feature (1)..(1): 5'-3 attached terminal deoxyabasic moiety
  misc_feature (1)..(1): 2'-deoxy-2'-fluoro
  misc_feature (2)..(3): 2'-deoxy
  misc_feature (4)..(4): 2'-deoxy-2'-fluoro
  misc_feature (5)..(5): 2'-deoxy
  misc_feature (6)..(7): 2'-deoxy-2'-fluoro
  misc_feature (8)..(8): 2'-deoxy
  misc_feature (9)..(11): 2'-deoxy-2'-fluoro
  misc_feature (12)..(13): 2'-deoxy
  misc_feature (14)..(14): 2'-deoxy-2'-fluoro
  misc_feature (15)..(18): 2'-deoxy
  misc_feature (19)..(19): 2'-deoxy-2'-fluoro
  misc_feature (20)..(20): n is thymidine
  misc_feature (21)..(21): 3'-3 attached terminal deoxyabasic moiety
ugguacugccugauagggunn

SEQ ID NO: 1559 - RNA, 21 nt, Artificial Sequence
  Description of Artificial Sequence: siNA sense
  misc_feature (1)..(1): 5'-3 attached terminal deoxyabasic moiety
  misc_feature (1)..(2): 2'-deoxy
  misc_feature (3)..(3): 2'-deoxy-2'-fluoro
  misc_feature (4)..(4): 2'-deoxy
  misc_feature (5)..(6): 2'-deoxy-2'-fluoro
  misc_feature (7)..(7): 2'-deoxy
  misc_feature (8)..(10): 2'-deoxy-2'-fluoro
  misc_feature (11)..(12): 2'-deoxy
  misc_feature (13)..(13): 2'-deoxy-2'-fluoro
  misc_feature (14)..(17): 2'-deoxy
  misc_feature (18)..(18): 2'-deoxy-2'-fluoro
  misc_feature (19)..(19): 2'-deoxy
  misc_feature (20)..(20): n is thymidine
  misc_feature (21)..(21): 3'-3 attached terminal deoxyabasic moiety
gguacugccugauagggugnn

SEQ ID NO: 1560 - RNA, 21 nt, Artificial Sequence
  Description of Artificial Sequence: siNA sense
  misc_feature (1)..(1): 5'-3 attached terminal deoxyabasic moiety
  misc_feature (1)..(1): 2'-deoxy
  misc_feature (2)..(2): 2'-deoxy-2'-fluoro
  misc_feature (3)..(3): 2'-deoxy
  misc_feature (4)..(5): 2'-deoxy-2'-fluoro
  misc_feature (6)..(6): 2'-deoxy
  misc_feature (7)..(9): 2'-deoxy-2'-fluoro
  misc_feature (10)..(11): 2'-deoxy
  misc_feature (12)..(12): 2'-deoxy-2'-fluoro
  misc_feature (13)..(16): 2'-deoxy
  misc_feature (17)..(17): 2'-deoxy-2'-fluoro
  misc_feature (18)..(18): 2'-deoxy
  misc_feature (19)..(19): 2'-deoxy-2'-fluoro
  misc_feature (20)..(20): n is thymidine
  misc_feature (21)..(21): 3'-3 attached terminal deoxyabasic moiety
guacugccugauagggugcnn

SEQ ID NO: 1561 - RNA, 21 nt, Artificial Sequence
  Description of Artificial Sequence: siNA sense
  misc_feature (1)..(1): 5'-3 attached terminal deoxyabasic moiety
  misc_feature (1)..(1): 2'-deoxy-2'-fluoro
  misc_feature (2)..(2): 2'-deoxy
  misc_feature (3)..(4): 2'-deoxy-2'-fluoro
  misc_feature (5)..(5): 2'-deoxy
  misc_feature (6)..(8): 2'-deoxy-2'-fluoro
  misc_feature (9)..(10): 2'-deoxy
  misc_feature (11)..(11): 2'-deoxy-2'-fluoro
  misc_feature (12)..(15): 2'-deoxy
  misc_feature (16)..(16): 2'-deoxy-2'-fluoro
  misc_feature (17)..(17): 2'-deoxy
  misc_feature (18)..(19): 2'-deoxy-2'-fluoro
  misc_feature (20)..(20): n is thymidine
  misc_feature (21)..(21): 3'-3 attached terminal deoxyabasic moiety
uacugccugauagggugcunn

SEQ ID NO: 1562 - RNA, 21 nt, Artificial Sequence
  Description of Artificial Sequence: siNA sense
  misc_feature (1)..(1): 5'-3 attached terminal deoxyabasic moiety
  misc_feature (1)..(2): 2'-deoxy-2'-fluoro
  misc_feature (3)..(3): 2'-deoxy
  misc_feature (4)..(6): 2'-deoxy-2'-fluoro
  misc_feature (7)..(8): 2'-deoxy
  misc_feature (9)..(9): 2'-deoxy-2'-fluoro
  misc_feature (10)..(13): 2'-deoxy
  misc_feature (14)..(14): 2'-deoxy-2'-fluoro
  misc_feature (15)..(15): 2'-deoxy
  misc_feature (16)..(18): 2'-deoxy-2'-fluoro
  misc_feature (19)..(19): 2'-deoxy
  misc_feature (20)..(20): n is thymidine
  misc_feature (21)..(21): 3'-3 attached terminal deoxyabasic moiety
cugccugauagggugcuugnn

SEQ ID NO: 1563 - RNA, 21 nt, Artificial Sequence
  Description of Artificial Sequence: siNA sense
  misc_feature (1)..(1): 5'-3 attached terminal deoxyabasic moiety
  misc_feature (1)..(1): 2'-deoxy-2'-fluoro
  misc_feature (2)..(2): 2'-deoxy
  misc_feature (3)..(5): 2'-deoxy-2'-fluoro
  misc_feature (6)..(7): 2'-deoxy
  misc_feature (8)..(8): 2'-deoxy-2'-fluoro
  misc_feature (9)..(12): 2'-deoxy
  misc_feature (13)..(13): 2'-deoxy-2'-fluoro
  misc_feature (14)..(14): 2'-deoxy
  misc_feature (15)..(17): 2'-deoxy-2'-fluoro
  misc_feature (18)..(18): 2'-deoxy
  misc_feature (19)..(19): 2'-deoxy-2'-fluoro
  misc_feature (20)..(20): n is thymidine
  misc_feature (21)..(21): 3'-3 attached terminal deoxyabasic moiety
ugccugauagggugcuugcnn

SEQ ID NO: 1564 - RNA, 21 nt, Artificial Sequence
  Description of Artificial Sequence: siNA sense
  misc_feature (1)..(1): 5'-3 attached terminal deoxyabasic moiety
  misc_feature (1)..(3): 2'-deoxy-2'-fluoro
  misc_feature (4)..(5): 2'-deoxy
  misc_feature (6)..(6): 2'-deoxy-2'-fluoro
  misc_feature (7)..(10): 2'-deoxy
  misc_feature (11)..(11): 2'-deoxy-2'-fluoro
  misc_feature (12)..(12): 2'-deoxy
  misc_feature (13)..(15): 2'-deoxy-2'-fluoro
  misc_feature (16)..(16): 2'-deoxy
  misc_feature (17)..(17): 2'-deoxy-2'-fluoro
  misc_feature (18)..(19): 2'-deoxy
  misc_feature (20)..(20): n is thymidine
  misc_feature (21)..(21): 3'-3 attached terminal deoxyabasic moiety
ccugauagggugcuugcgann

SEQ ID NO: 1565 - RNA, 21 nt, Artificial Sequence
  Description of Artificial Sequence: siNA sense
  misc_feature (1)..(1): 5'-3 attached terminal deoxyabasic moiety
  misc_feature (1)..(2): 2'-deoxy
  misc_feature (3)..(3): 2'-deoxy-2'-fluoro
  misc_feature (4)..(7): 2'-deoxy
  misc_feature (8)..(8): 2'-deoxy-2'-fluoro
  misc_feature (9)..(9): 2'-deoxy
  misc_feature (10)..(12): 2'-deoxy-2'-fluoro
  misc_feature (13)..(13): 2'-deoxy
  misc_feature (14)..(14): 2'-deoxy-2'-fluoro
  misc_feature (15)..(17): 2'-deoxy
  misc_feature (18)..(18): 2'-deoxy-2'-fluoro
  misc_feature (19)..(19): 2'-deoxy
  misc_feature (20)..(20): n is thymidine
  misc_feature (21)..(21): 3'-3 attached terminal deoxyabasic moiety
gauagggugcuugcgagugnn

SEQ ID NO: 1566 - RNA, 21 nt, Artificial Sequence
  Description of Artificial Sequence: siNA sense
  misc_feature (1)..(1): 5'-3 attached terminal deoxyabasic moiety
  misc_feature (1)..(1): 2'-deoxy
  misc_feature (2)..(5): 2'-deoxy-2'-fluoro
  misc_feature (6)..(11): 2'-deoxy
  misc_feature (12)..(15): 2'-deoxy-2'-fluoro
  misc_feature (16)..(16): 2'-deoxy
  misc_feature (17)..(17): 2'-deoxy-2'-fluoro
  misc_feature (18)..(19): 2'-deoxy
  misc_feature (20)..(20): n is thymidine
  misc_feature (21)..(21): 3'-3 attached terminal deoxyabasic moiety
gccccgggaggucucguagnn

SEQ ID NO: 1567 - RNA, 21 nt, Artificial Sequence
  Description of Artificial Sequence: siNA antisense
  misc_feature (1)..(1): 2'-O-methyl
  misc_feature (2)..(3): 2'-deoxy-2'-fluoro
  misc_feature (4)..(5): 2'-O-methyl
  misc_feature (6)..(9): 2'-deoxy-2'-fluoro
  misc_feature (10)..(10): 2'-O-methyl
  misc_feature (11)..(11): 2'-deoxy-2'-fluoro
  misc_feature (12)..(14): 2'-O-methyl
  misc_feature (15)..(16): 2'-deoxy-2'-fluoro
  misc_feature (17)..(17): 2'-O-methyl
  misc_feature (18)..(19): 2'-deoxy-2'-fluoro
  misc_feature (20)..(21): internucleotide phosphorothioate linkage
accgguuccgcagaccacunn

SEQ ID NO: 1568 - RNA, 21 nt, Artificial Sequence
  Description of Artificial Sequence: siNA antisense
  misc_feature (1)..(1): 2'-O-methyl
  misc_feature (2)..(2): 2'-deoxy-2'-fluoro
  misc_feature (3)..(3): 2'-O-methyl
  misc_feature (4)..(6): 2'-deoxy-2'-fluoro
  misc_feature (7)..(7): 2'-O-methyl
  misc_feature (8)..(9): 2'-deoxy-2'-fluoro
  misc_feature (10)..(11): 2'-O-methyl
  misc_feature (12)..(15): 2'-deoxy-2'-fluoro
  misc_feature (16)..(16): 2'-O-methyl
  misc_feature (17)..(17): 2'-deoxy-2'-fluoro
  misc_feature (18)..(19): 2'-O-methyl
  misc_feature (20)..(21): internucleotide phosphorothioate linkage
guacucaccgguuccgcagnn

SEQ ID NO: 1569 - RNA, 21 nt, Artificial Sequence
  Description of Artificial Sequence: siNA antisense
  misc_feature (1)..(1): 2'-deoxy-2'-fluoro
  misc_feature (2)..(2): 2'-O-methyl
  misc_feature (3)..(4): 2'-deoxy-2'-fluoro
  misc_feature (5)..(7): 2'-O-methyl
  misc_feature (8)..(8): 2'-deoxy-2'-fluoro
  misc_feature (9)..(10): 2'-O-methyl
  misc_feature (11)..(11): 2'-deoxy-2'-fluoro
  misc_feature (12)..(12): 2'-O-methyl
  misc_feature (13)..(14): 2'-deoxy-2'-fluoro
  misc_feature (15)..(15): 2'-O-methyl
  misc_feature (16)..(16): 2'-deoxy-2'-fluoro
  misc_feature (17)..(19): 2'-O-methyl
  misc_feature (20)..(21): internucleotide phosphorothioate linkage
uaucaggcaguaccacaagnn

SEQ ID NO: 1570 - RNA, 21 nt, Artificial Sequence
  Description of Artificial Sequence: siNA antisense
  misc_feature (1)..(1): 2'-O-methyl
  misc_feature (2)..(5): 2'-deoxy-2'-fluoro
  misc_feature (6)..(6): 2'-O-methyl
  misc_feature (7)..(8): 2'-deoxy-2'-fluoro
  misc_feature (9)..(11): 2'-O-methyl
  misc_feature (12)..(12): 2'-deoxy-2'-fluoro
  misc_feature (13)..(14): 2'-O-methyl
  misc_feature (15)..(15): 2'-deoxy-2'-fluoro
  misc_feature (16)..(16): 2'-O-methyl
  misc_feature (17)..(18): 2'-deoxy-2'-fluoro
  misc_feature (19)..(19): 2'-O-methyl
  misc_feature (20)..(21): internucleotide phosphorothioate linkage
acccuaucaggcaguaccann

SEQ ID NO: 1571 - RNA, 21 nt, Artificial Sequence
  Description of Artificial Sequence: siNA antisense
  misc_feature (1)..(1): 2'-deoxy-2'-fluoro
  misc_feature (2)..(2): 2'-O-methyl
  misc_feature (3)..(6): 2'-deoxy-2'-fluoro
  misc_feature (7)..(7): 2'-O-methyl
  misc_feature (8)..(9): 2'-deoxy-2'-fluoro
  misc_feature (10)..(12): 2'-O-methyl
  misc_feature (13)..(13): 2'-deoxy-2'-fluoro
  misc_feature (14)..(15): 2'-O-methyl
  misc_feature (16)..(16): 2'-deoxy-2'-fluoro
  misc_feature (17)..(17): 2'-O-methyl
  misc_feature (18)..(19): 2'-deoxy-2'-fluoro
  misc_feature (20)..(21): internucleotide phosphorothioate linkage
cacccuaucaggcaguaccnn

SEQ ID NO: 1572 - RNA, 21 nt, Artificial Sequence
  Description of Artificial Sequence: siNA antisense
  misc_feature (1)..(1): 2'-O-methyl
  misc_feature (2)..(2): 2'-deoxy-2'-fluoro
  misc_feature (3)..(3): 2'-O-methyl
  misc_feature (4)..(7): 2'-deoxy-2'-fluoro
  misc_feature (8)..(8): 2'-O-methyl
  misc_feature (9)..(10): 2'-deoxy-2'-fluoro
  misc_feature (11)..(13): 2'-O-methyl
  misc_feature (14)..(14): 2'-deoxy-2'-fluoro
  misc_feature (15)..(16): 2'-O-methyl
  misc_feature (17)..(17): 2'-deoxy-2'-fluoro
  misc_feature (18)..(18): 2'-O-methyl
  misc_feature (19)..(19): 2'-deoxy-2'-fluoro
  misc_feature (20)..(21): internucleotide phosphorothioate linkage
gcacccuaucaggcaguacnn

SEQ ID NO: 1573 - RNA, 21 nt, Artificial Sequence
  Description of Artificial Sequence: siNA antisense
  misc_feature (1)..(2): 2'-O-methyl
  misc_feature (3)..(3): 2'-deoxy-2'-fluoro
  misc_feature (4)..(4): 2'-O-methyl
  misc_feature (5)..(8): 2'-deoxy-2'-fluoro
  misc_feature (9)..(9): 2'-O-methyl
  misc_feature (10)..(11): 2'-deoxy-2'-fluoro
  misc_feature (12)..(14): 2'-O-methyl
  misc_feature (15)..(15): 2'-deoxy-2'-fluoro
  misc_feature (16)..(17): 2'-O-methyl
  misc_feature (18)..(18): 2'-deoxy-2'-fluoro
  misc_feature (19)..(19): 2'-O-methyl
  misc_feature (20)..(21): internucleotide phosphorothioate linkage
agcacccuaucaggcaguann

SEQ ID NO: 1574 - RNA, 21 nt, Artificial Sequence
  Description of Artificial Sequence: siNA antisense
  misc_feature (1)..(1): 2'-deoxy-2'-fluoro
  misc_feature (2)..(4): 2'-O-methyl
  misc_feature (5)..(5): 2'-deoxy-2'-fluoro
  misc_feature (6)..(6): 2'-O-methyl
  misc_feature (7)..(10): 2'-deoxy-2'-fluoro
  misc_feature (11)..(11): 2'-O-methyl
  misc_feature (12)..(13): 2'-deoxy-2'-fluoro
  misc_feature (14)..(16): 2'-O-methyl
  misc_feature (17)..(17): 2'-deoxy-2'-fluoro
  misc_feature (18)..(19): 2'-O-methyl
  misc_feature (20)..(21): internucleotide phosphorothioate linkage
caagcacccuaucaggcagnn

SEQ ID NO: 1575 - RNA, 21 nt, Artificial Sequence
  Description of Artificial Sequence: siNA antisense
  misc_feature (1)..(1): 2'-O-methyl
  misc_feature (2)..(2): 2'-deoxy-2'-fluoro
  misc_feature (3)..(5): 2'-O-methyl
  misc_feature (6)..(6): 2'-deoxy-2'-fluoro
  misc_feature (7)..(7): 2'-O-methyl
  misc_feature (8)..(11): 2'-deoxy-2'-fluoro
  misc_feature (12)..(12): 2'-O-methyl
  misc_feature (13)..(14): 2'-deoxy-2'-fluoro
  misc_feature (15)..(17): 2'-O-methyl
  misc_feature (18)..(18): 2'-deoxy-2'-fluoro
  misc_feature (19)..(19): 2'-O-methyl
  misc_feature (20)..(21): internucleotide phosphorothioate linkage
gcaagcacccuaucaggcann

SEQ ID NO: 1576 - RNA, 21 nt, Artificial Sequence
  Description of Artificial Sequence: siNA antisense
  misc_feature (1)..(2): 2'-deoxy-2'-fluoro
  misc_feature (3)..(3): 2'-O-methyl
  misc_feature (4)..(4): 2'-deoxy-2'-fluoro
  misc_feature (5)..(7): 2'-O-methyl
  misc_feature (8)..(8): 2'-deoxy-2'-fluoro
  misc_feature (9)..(9): 2'-O-methyl
  misc_feature (10)..(13): 2'-deoxy-2'-fluoro
  misc_feature (14)..(14): 2'-O-methyl
  misc_feature (15)..(16): 2'-deoxy-2'-fluoro
  misc_feature (17)..(19): 2'-O-methyl
  misc_feature (20)..(21): internucleotide phosphorothioate linkage
ucgcaagcacccuaucaggnn

SEQ ID NO: 1577 - RNA, 21 nt, Artificial Sequence
  Description of Artificial Sequence: siNA antisense
  misc_feature (1)..(1): 2'-deoxy-2'-fluoro
  misc_feature (2)..(2): 2'-O-methyl
  misc_feature (3)..(5): 2'-deoxy-2'-fluoro
  misc_feature (6)..(6): 2'-O-methyl
  misc_feature (7)..(7): 2'-deoxy-2'-fluoro
  misc_feature (8)..(10): 2'-O-methyl
  misc_feature (11)..(11): 2'-deoxy-2'-fluoro
  misc_feature (12)..(12): 2'-O-methyl
  misc_feature (13)..(16): 2'-deoxy-2'-fluoro
  misc_feature (17)..(17): 2'-O-methyl
  misc_feature (18)..(19): 2'-deoxy-2'-fluoro
  misc_feature (20)..(21): internucleotide phosphorothioate linkage
cacucgcaagcacccuaucnn

SEQ ID NO: 1578 - RNA, 21 nt, Artificial Sequence
  Description of Artificial Sequence: siNA antisense
  misc_feature (1)..(2): 2'-deoxy-2'-fluoro
  misc_feature (3)..(3): 2'-O-methyl
  misc_feature (4)..(4): 2'-deoxy-2'-fluoro
  misc_feature (5)..(8): 2'-O-methyl
  misc_feature (9)..(14): 2'-deoxy-2'-fluoro
  misc_feature (15)..(18): 2'-O-methyl
  misc_feature (19)..(19): 2'-deoxy-2'-fluoro
  misc_feature (20)..(21): internucleotide phosphorothioate linkage
cuacgagaccucccggggcnn

SEQ ID NO: 1579 - RNA, 21 nt, Artificial Sequence
  Description of Artificial Sequence: siNA sense
  misc_feature (1)..(1): 5'-3 attached terminal deoxyabasic moiety
  misc_feature (1)..(1): 2'-deoxy-2'-fluoro
  misc_feature (2)..(3): 2'-deoxy
  misc_feature (4)..(5): 2'-deoxy-2'-fluoro
  misc_feature (6)..(9): 2'-deoxy
  misc_feature (10)..(10): 2'-deoxy-2'-fluoro
  misc_feature (11)..(11): 2'-deoxy
  misc_feature (12)..(14): 2'-deoxy-2'-fluoro
  misc_feature (15)..(16): 2'-deoxy
  misc_feature (17)..(17): 2'-deoxy-2'-fluoro
  misc_feature (18)..(19): 2'-deoxy
  misc_feature (20)..(20): n is thymidine
  misc_feature (21)..(21): 3'-3 attached terminal deoxyabasic moiety
uggccaaggcgucuggugann

SEQ ID NO: 1580 - RNA, 21 nt, Artificial Sequence
  Description of Artificial Sequence: siNA sense
  misc_feature (1)..(1): 5'-3 attached terminal deoxyabasic moiety
  misc_feature (1)..(1): 2'-deoxy-2'-fluoro
  misc_feature (2)..(2): 2'-deoxy
  misc_feature (3)..(3): 2'-deoxy-2'-fluoro
  misc_feature (4)..(6): 2'-deoxy
  misc_feature (7)..(7): 2'-deoxy-2'-fluoro
  misc_feature (8)..(9): 2'-deoxy
  misc_feature (10)..(11): 2'-deoxy-2'-fluoro
  misc_feature (12)..(15): 2'-deoxy
  misc_feature (16)..(16): 2'-deoxy-2'-fluoro
  misc_feature (17)..(17): 2'-deoxy
  misc_feature (18)..(19): 2'-deoxy-2'-fluoro
  misc_feature (20)..(20): n is thymidine
  misc_feature (21)..(21): 3'-3 attached terminal deoxyabasic moiety
caugaguggccaaggcgucnn

SEQ ID NO: 1581 - RNA, 21 nt, Artificial Sequence
  Description of Artificial Sequence: siNA sense
  misc_feature (1)..(1): 5'-3 attached terminal deoxyabasic moiety
  misc_feature (1)..(1): 2'-deoxy
  misc_feature (2)..(2): 2'-deoxy-2'-fluoro
  misc_feature (3)..(4): 2'-deoxy
  misc_feature (5)..(7): 2'-deoxy-2'-fluoro
  misc_feature (8)..(8): 2'-deoxy
  misc_feature (9)..(10): 2'-deoxy-2'-fluoro
  misc_feature (11)..(11): 2'-deoxy
  misc_feature (12)..(12): 2'-deoxy-2'-fluoro
  misc_feature (13)..(14): 2'-deoxy
  misc_feature (15)..(15): 2'-deoxy-2'-fluoro
  misc_feature (16)..(16): 2'-deoxy
  misc_feature (17)..(19): 2'-deoxy-2'-fluoro
  misc_feature (20)..(20): n is thymidine
  misc_feature (21)..(21): 3'-3 attached terminal deoxyabasic moiety
auaguccgucaugguguucnn

SEQ ID NO: 1582 - RNA, 21 nt, Artificial Sequence
  Description of Artificial Sequence: siNA sense
  misc_feature (1)..(1): 5'-3 attached terminal deoxyabasic moiety
  misc_feature (1)..(1): 2'-deoxy-2'-fluoro
  misc_feature (2)..(5): 2'-deoxy
  misc_feature (6)..(6): 2'-deoxy-2'-fluoro
  misc_feature (7)..(8): 2'-deoxy
  misc_feature (9)..(11): 2'-deoxy-2'-fluoro
  misc_feature (12)..(12): 2'-deoxy
  misc_feature (13)..(14): 2'-deoxy-2'-fluoro
  misc_feature (15)..(15): 2'-deoxy
  misc_feature (16)..(16): 2'-deoxy-2'-fluoro
  misc_feature (17)..(18): 2'-deoxy
  misc_feature (19)..(19): 2'-deoxy-2'-fluoro
  misc_feature (20)..(20): n is thymidine
  misc_feature (21)..(21): 3'-3 attached terminal deoxyabasic moiety
ugggauaguccgucauggunn

SEQ ID NO: 1583 - RNA, 21 nt, Artificial Sequence
  Description of Artificial Sequence: siNA sense
  misc_feature (1)..(1): 5'-3 attached terminal deoxyabasic moiety
  misc_feature (1)..(1): 2'-deoxy
  misc_feature (2)..(2): 2'-deoxy-2'-fluoro
  misc_feature (3)..(6): 2'-deoxy
  misc_feature (7)..(7): 2'-deoxy-2'-fluoro
  misc_feature (8)..(9): 2'-deoxy
  misc_feature (10)..(12): 2'-deoxy-2'-fluoro
  misc_feature (13)..(13): 2'-deoxy
  misc_feature (14)..(15): 2'-deoxy-2'-fluoro
  misc_feature (16)..(16): 2'-deoxy
  misc_feature (17)..(17): 2'-deoxy-2'-fluoro
  misc_feature (18)..(19): 2'-deoxy
  misc_feature (20)..(20): n is thymidine
  misc_feature (21)..(21): 3'-3 attached terminal deoxyabasic moiety
gugggauaguccgucauggnn

SEQ ID NO: 1584 - RNA, 21 nt, Artificial Sequence
  Description of Artificial Sequence: siNA sense
  misc_feature (1)..(1): 5'-3 attached terminal deoxyabasic moiety
  misc_feature (1)..(1): 2'-deoxy-2'-fluoro
  misc_feature (2)..(2): 2'-deoxy
  misc_feature (3)..(3): 2'-deoxy-2'-fluoro
  misc_feature (4)..(7): 2'-deoxy
  misc_feature (8)..(8): 2'-deoxy-2'-fluoro
  misc_feature (9)..(10): 2'-deoxy
  misc_feature (11)..(13): 2'-deoxy-2'-fluoro
  misc_feature (14)..(14): 2'-deoxy
  misc_feature (15)..(16): 2'-deoxy-2'-fluoro
  misc_feature (17)..(17): 2'-deoxy
  misc_feature (18)..(18): 2'-deoxy-2'-fluoro
  misc_feature (19)..(19): 2'-deoxy
  misc_feature (20)..(20): n is thymidine
  misc_feature (21)..(21): 3'-3 attached terminal deoxyabasic moiety
cgugggauaguccgucaugnn

SEQ ID NO: 1585 - RNA, 21 nt, Artificial Sequence
  Description of Artificial Sequence: siNA sense
  misc_feature (1)..(1): 5'-3 attached terminal deoxyabasic moiety
  misc_feature (1)..(2): 2'-deoxy-2'-fluoro
  misc_feature (3)..(3): 2'-deoxy
  misc_feature (4)..(4): 2'-deoxy-2'-fluoro
  misc_feature (5)..(8): 2'-deoxy
  misc_feature (9)..(9): 2'-deoxy-2'-fluoro
  misc_feature (10)..(11): 2'-deoxy
  misc_feature (12)..(14): 2'-deoxy-2'-fluoro
  misc_feature (15)..(15): 2'-deoxy
  misc_feature (16)..(17): 2'-deoxy-2'-fluoro
  misc_feature (18)..(18): 2'-deoxy
  misc_feature (19)..(19): 2'-deoxy-2'-fluoro
  misc_feature (20)..(20): n is thymidine
  misc_feature (21)..(21): 3'-3 attached terminal deoxyabasic moiety
ucgugggauaguccgucaunn

SEQ ID NO: 1586 - RNA, 21 nt, Artificial Sequence
  Description of Artificial Sequence: siNA sense
  misc_feature (1)..(1): 5'-3 attached terminal deoxyabasic moiety
  misc_feature (1)..(1): 2'-deoxy
  misc_feature (2)..(4): 2'-deoxy-2'-fluoro
  misc_feature (5)..(5): 2'-deoxy
  misc_feature (6)..(6): 2'-deoxy-2'-fluoro
  misc_feature (7)..(10): 2'-deoxy
  misc_feature (11)..(11): 2'-deoxy-2'-fluoro
  misc_feature (12)..(13): 2'-deoxy
  misc_feature (14)..(16): 2'-deoxy-2'-fluoro
  misc_feature (17)..(17): 2'-deoxy
  misc_feature (18)..(19): 2'-deoxy-2'-fluoro
  misc_feature (20)..(20): n is thymidine
  misc_feature (21)..(21): 3'-3 attached terminal deoxyabasic moiety
guucgugggauaguccgucnn

SEQ ID NO: 1587 - RNA, 21 nt, Artificial Sequence
  Description of Artificial Sequence: siNA sense
  misc_feature (1)..(1): 5'-3 attached terminal deoxyabasic moiety
  misc_feature (1)..(1): 2'-deoxy-2'-fluoro
  misc_feature (2)..(2): 2'-deoxy
  misc_feature (3)..(5): 2'-deoxy-2'-fluoro
  misc_feature (6)..(6): 2'-deoxy
  misc_feature (7)..(7): 2'-deoxy-2'-fluoro
  misc_feature (8)..(11): 2'-deoxy
  misc_feature (12)..(12): 2'-deoxy-2'-fluoro
  misc_feature (13)..(14): 2'-deoxy
  misc_feature (15)..(17): 2'-deoxy-2'-fluoro
  misc_feature (18)..(18): 2'-deoxy
  misc_feature (19)..(19): 2'-deoxy-2'-fluoro
  misc_feature (20)..(20): n is thymidine
  misc_feature (21)..(21): 3'-3 attached terminal deoxyabasic moiety
cguucgugggauaguccgunn

SEQ ID NO: 1588 - RNA, 21 nt, Artificial Sequence
  Description of Artificial Sequence: siNA sense
  misc_feature (1)..(1): 5'-3 attached terminal deoxyabasic moiety
  misc_feature (1)..(2): 2'-deoxy
  misc_feature (3)..(3): 2'-deoxy-2'-fluoro
  misc_feature (4)..(4): 2'-deoxy
  misc_feature (5)..(7): 2'-deoxy-2'-fluoro
  misc_feature (8)..(8): 2'-deoxy
  misc_feature (9)..(9): 2'-deoxy-2'-fluoro
  misc_feature (10)..(13): 2'-deoxy
  misc_feature (14)..(14): 2'-deoxy-2'-fluoro
  misc_feature (15)..(16): 2'-deoxy
  misc_feature (17)..(19): 2'-deoxy-2'-fluoro
  misc_feature (20)..(20): n is thymidine
  misc_feature (21)..(21): 3'-3 attached terminal deoxyabasic moiety
agcguucgugggauaguccnn

SEQ ID NO: 1589 - RNA, 21 nt, Artificial Sequence
  Description of Artificial Sequence: siNA sense
  misc_feature (1)..(1): 5'-3 attached terminal deoxyabasic moiety
  misc_feature (1)..(1): 2'-deoxy
  misc_feature (2)..(2): 2'-deoxy-2'-fluoro
  misc_feature (3)..(5): 2'-deoxy
  misc_feature (6)..(6): 2'-deoxy-2'-fluoro
  misc_feature (7)..(7): 2'-deoxy
  misc_feature (8)..(10): 2'-deoxy-2'-fluoro
  misc_feature (11)..(11): 2'-deoxy
  misc_feature (12)..(12): 2'-deoxy-2'-fluoro
  misc_feature (13)..(16): 2'-deoxy
  misc_feature (17)..(17): 2'-deoxy-2'-fluoro
  misc_feature (18)..(19): 2'-deoxy
  misc_feature (20)..(20): n is thymidine
  misc_feature (21)..(21): 3'-3 attached terminal deoxyabasic moiety
gugagcguucgugggauagnn

SEQ ID NO: 1590 - RNA, 21 nt, Artificial Sequence
  Description of Artificial Sequence: siNA sense
  misc_feature (1)..(1): 5'-3 attached terminal deoxyabasic moiety
  misc_feature (1)..(2): 2'-deoxy
  misc_feature (3)..(3): 2'-deoxy-2'-fluoro
  misc_feature (4)..(4): 2'-deoxy
  misc_feature (5)..(8): 2'-deoxy-2'-fluoro
  misc_feature (9)..(14): 2'-deoxy
  misc_feature (15)..(18): 2'-deoxy-2'-fluoro
  misc_feature (19)..(19): 2'-deoxy
  misc_feature (20)..(20): n is thymidine
  misc_feature (21)..(21): 3'-3 attached terminal deoxyabasic moiety
gaugcucuggagggccccgnn

SEQ ID NO: 1591 - RNA, 21 nt, Artificial Sequence
  Description of Artificial Sequence: siNA antisense
  misc_feature (1)..(2): 2'-deoxy-2'-fluoro
  misc_feature (3)..(3): 2'-O-methyl
  misc_feature (4)..(5): 2'-deoxy-2'-fluoro
  misc_feature (6)..(8): 2'-O-methyl
  misc_feature (9)..(9): 2'-deoxy-2'-fluoro
  misc_feature (10)..(10): 2'-O-methyl
  misc_feature (11)..(14): 2'-deoxy-2'-fluoro
  misc_feature (15)..(16): 2'-O-methyl
  misc_feature (17)..(18): 2'-deoxy-2'-fluoro
  misc_feature (19)..(19): 2'-O-methyl
  misc_feature (20)..(21): internucleotide phosphorothioate linkage
ucaccagacgccuuggccann

SEQ ID NO: 1592 - RNA, 21 nt, Artificial Sequence
  Description of Artificial Sequence: siNA antisense
  misc_feature (1)..(1): 2'-O-methyl
  misc_feature (2)..(3): 2'-deoxy-2'-fluoro
  misc_feature (4)..(4): 2'-O-methyl
  misc_feature (5)..(8): 2'-deoxy-2'-fluoro
  misc_feature (9)..(10): 2'-O-methyl
  misc_feature (11)..(12): 2'-deoxy-2'-fluoro
  misc_feature (13)..(13): 2'-O-methyl
  misc_feature (14)..(16): 2'-deoxy-2'-fluoro
  misc_feature (17)..(17): 2'-O-methyl
  misc_feature (18)..(18): 2'-deoxy-2'-fluoro
  misc_feature (19)..(19): 2'-O-methyl
  misc_feature (20)..(21): internucleotide phosphorothioate linkage
gacgccuuggccacucaugnn

SEQ ID NO: 1593 - RNA, 21 nt, Artificial Sequence
  Description of Artificial Sequence: siNA antisense
  misc_feature (1)..(3): 2'-O-methyl
  misc_feature (4)..(4): 2'-deoxy-2'-fluoro
  misc_feature (5)..(5): 2'-O-methyl
  misc_feature (6)..(7): 2'-deoxy-2'-fluoro
  misc_feature (8)..(8): 2'-O-methyl
  misc_feature (9)..(9): 2'-deoxy-2'-fluoro
  misc_feature (10)..(11): 2'-O-methyl
  misc_feature (12)..(12): 2'-deoxy-2'-fluoro
  misc_feature (13)..(15): 2'-O-methyl
  misc_feature (16)..(17): 2'-deoxy-2'-fluoro
  misc_feature (18)..(18): 2'-O-methyl
  misc_feature (19)..(19): 2'-deoxy-2'-fluoro
  misc_feature (20)..(21): internucleotide phosphorothioate linkage
gaacaccaugacggacuaunn

SEQ ID NO: 1594 - RNA, 21 nt, Artificial Sequence
  Description of Artificial Sequence: siNA antisense
  misc_feature (1)..(1): 2'-O-methyl
  misc_feature (2)..(3): 2'-deoxy-2'-fluoro
  misc_feature (4)..(4): 2'-O-methyl
  misc_feature (5)..(5): 2'-deoxy-2'-fluoro
  misc_feature (6)..(7): 2'-O-methyl
  misc_feature (8)..(8): 2'-deoxy-2'-fluoro
  misc_feature (9)..(11): 2'-O-methyl
  misc_feature (12)..(13): 2'-deoxy-2'-fluoro
  misc_feature (14)..(14): 2'-O-methyl
  misc_feature (15)..(18): 2'-deoxy-2'-fluoro
  misc_feature (19)..(19): 2'-O-methyl
  misc_feature (20)..(21): internucleotide phosphorothioate linkage
accaugacggacuaucccann

SEQ ID NO: 1595 - RNA, 21 nt, Artificial Sequence
  Description of Artificial Sequence: siNA antisense
  misc_feature (1)..(2): 2'-deoxy-2'-fluoro
  misc_feature (3)..(3): 2'-O-methyl
  misc_feature (4)..(4): 2'-deoxy-2'-fluoro
  misc_feature (5)..(6): 2'-O-methyl
  misc_feature (7)..(7): 2'-deoxy-2'-fluoro
  misc_feature (8)..(10): 2'-O-methyl
  misc_feature (11)..(12): 2'-deoxy-2'-fluoro
  misc_feature (13)..(13): 2'-O-methyl
  misc_feature (14)..(17): 2'-deoxy-2'-fluoro
  misc_feature (18)..(18): 2'-O-methyl
  misc_feature (19)..(19): 2'-deoxy-2'-fluoro
  misc_feature (20)..(21): internucleotide phosphorothioate linkage
ccaugacggacuaucccacnn

SEQ ID NO: 1596 - RNA, 21 nt, Artificial Sequence
  Description of Artificial Sequence: siNA antisense
  misc_feature (1)..(1): 2'-deoxy-2'-fluoro
  misc_feature (2)..(2): 2'-O-methyl
  misc_feature (3)..(3): 2'-deoxy-2'-fluoro
  misc_feature (4)..(5): 2'-O-methyl
  misc_feature (6)..(6): 2'-deoxy-2'-fluoro
  misc_feature (7)..(9): 2'-O-methyl
  misc_feature (10)..(11): 2'-deoxy-2'-fluoro
  misc_feature (12)..(12): 2'-O-methyl
  misc_feature (13)..(16): 2'-deoxy-2'-fluoro
  misc_feature (17)..(17): 2'-O-methyl
  misc_feature (18)..(18): 2'-deoxy-2'-fluoro
  misc_feature (19)..(19): 2'-O-methyl
  misc_feature (20)..(21): internucleotide phosphorothioate linkage
caugacggacuaucccacgnn

SEQ ID NO: 1597 - RNA, 21 nt, Artificial Sequence
  Description of Artificial Sequence: siNA antisense
  misc_feature (1)..(1): 2'-O-methyl
  misc_feature (2)..(2): 2'-deoxy-2'-fluoro
  misc_feature (3)..(4): 2'-O-methyl
  misc_feature (5)..(5): 2'-deoxy-2'-fluoro
  misc_feature (6)..(8): 2'-O-methyl
  misc_feature (9)..(10): 2'-deoxy-2'-fluoro
  misc_feature (11)..(11): 2'-O-methyl
  misc_feature (12)..(15): 2'-deoxy-2'-fluoro
  misc_feature (16)..(16): 2'-O-methyl
  misc_feature (17)..(17): 2'-deoxy-2'-fluoro
  misc_feature (18)..(19): 2'-O-methyl
  misc_feature (20)..(21): internucleotide phosphorothioate linkage
augacggacuaucccacgann

SEQ ID NO: 1598 - RNA, 21 nt, Artificial Sequence
  Description of Artificial Sequence: siNA antisense
  misc_feature (1)..(2): 2'-O-methyl
  misc_feature (3)..(3): 2'-deoxy-2'-fluoro
  misc_feature (4)..(6): 2'-O-methyl
  misc_feature (7)..(8): 2'-deoxy-2'-fluoro
  misc_feature (9)..(9): 2'-O-methyl
  misc_feature (10)..(13): 2'-deoxy-2'-fluoro
  misc_feature (14)..(14): 2'-O-methyl
  misc_feature (15)..(15): 2'-deoxy-2'-fluoro
  misc_feature (16)..(18): 2'-O-methyl
  misc_feature (19)..(19): 2'-deoxy-2'-fluoro
  misc_feature (20)..(21): internucleotide phosphorothioate linkage
gacggacuaucccacgaacnn

SEQ ID NO: 1599 - RNA, 21 nt, Artificial Sequence
  Description of Artificial Sequence: siNA antisense
  misc_feature (1)..(1): 2'-O-methyl
  misc_feature (2)..(2): 2'-deoxy-2'-fluoro
  misc_feature (3)..(5): 2'-O-methyl
  misc_feature (6)..(7): 2'-deoxy-2'-fluoro
  misc_feature (8)..(8): 2'-O-methyl
  misc_feature (9)..(12): 2'-deoxy-2'-fluoro
  misc_feature (13)..(13): 2'-O-methyl
  misc_feature (14)..(14): 2'-deoxy-2'-fluoro
  misc_feature (15)..(17): 2'-O-methyl
  misc_feature (18)..(18): 2'-deoxy-2'-fluoro
  misc_feature (19)..(19): 2'-O-methyl
  misc_feature (20)..(21): internucleotide phosphorothioate linkage
acggacuaucccacgaacgnn

SEQ ID NO: 1600 - RNA, 21 nt, Artificial Sequence
  Description of Artificial Sequence: siNA antisense
  misc_feature (1)..(3): 2'-O-methyl
  misc_feature (4)..(5): 2'-deoxy-2'-fluoro
  misc_feature (6)..(6): 2'-O-methyl
  misc_feature (7)..(10): 2'-deoxy-2'-fluoro
  misc_feature (11)..(11): 2'-O-methyl
  misc_feature (12)..(12): 2'-deoxy-2'-fluoro
  misc_feature (13)..(15): 2'-O-methyl
  misc_feature (16)..(16): 2'-deoxy-2'-fluoro
  misc_feature (17)..(17): 2'-O-methyl
  misc_feature (18)..(19): 2'-deoxy-2'-fluoro
  misc_feature (20)..(21): internucleotide phosphorothioate linkage
ggacuaucccacgaacgcunn

SEQ ID NO: 1601 - RNA, 21 nt, Artificial Sequence
  Description of Artificial Sequence: siNA antisense
  misc_feature (1)..(2): 2'-deoxy-2'-fluoro
  misc_feature (3)..(3): 2'-O-methyl
  misc_feature (4)..(7): 2'-deoxy-2'-fluoro
  misc_feature (8)..(8): 2'-O-methyl
  misc_feature (9)..(9): 2'-deoxy-2'-fluoro
  misc_feature (10)..(12): 2'-O-methyl
  misc_feature (13)..(13): 2'-deoxy-2'-fluoro
  misc_feature (14)..(14): 2'-O-methyl
  misc_feature (15)..(17): 2'-deoxy-2'-fluoro
  misc_feature (18)..(18): 2'-O-methyl
  misc_feature (19)..(19): 2'-deoxy-2'-fluoro
  misc_feature (20)..(21): internucleotide phosphorothioate linkage
cuaucccacgaacgcucacnn

SEQ ID NO: 1602 - RNA, 21 nt, Artificial Sequence
  Description of Artificial Sequence: siNA antisense
  misc_feature (1)..(1): 2'-deoxy-2'-fluoro
  misc_feature (2)..(5): 2'-O-methyl
  misc_feature (6)..(11): 2'-deoxy-2'-fluoro
  misc_feature (12)..(15): 2'-O-methyl
  misc_feature (16)..(16): 2'-deoxy-2'-fluoro
  misc_feature (17)..(17): 2'-O-methyl
  misc_feature (18)..(19): 2'-deoxy-2'-fluoro
  misc_feature (20)..(21): internucleotide phosphorothioate linkage
cggggcccuccagagcaucnn

SEQ ID NO: 1603 - RNA, 21 nt, Artificial Sequence
  Description of Artificial Sequence: siNA sense
  misc_feature (1)..(1): 5'-3 attached terminal deoxyabasic moiety
  misc_feature (1)..(4): 2'-deoxy-2'-fluoro
  misc_feature (11)..(14): 2'-deoxy-2'-fluoro
  misc_feature (16)..(16): 2'-deoxy-2'-fluoro
  misc_feature (20)..(20): n is thymidine
  misc_feature (21)..(21): 3'-3 attached terminal deoxyabasic moiety
ccccgggaggucucguagann

SEQ ID NO: 1604 - RNA, 21 nt, Artificial Sequence
  Description of Artificial Sequence: siNA sense
  misc_feature (1)..(1): 5'-3 attached terminal deoxyabasic moiety
  misc_feature (4)..(4): 2'-deoxy-2'-fluoro
  misc_feature (6)..(9): 2'-deoxy-2'-fluoro
  misc_feature (16)..(19): 2'-deoxy-2'-fluoro
  misc_feature (20)..(20): n is thymidine
  misc_feature (21)..(21): 3'-3 attached terminal deoxyabasic moiety
agaugcucuggagggccccnn

SEQ ID NO: 1605 - RNA, 21 nt, Artificial Sequence
  Description of Artificial Sequence: siNA antisense
  misc_feature (1)..(3): 2'-deoxy-2'-fluoro
  misc_feature (5)..(5): 2'-deoxy-2'-fluoro
  misc_feature (10)..(15): 2'-deoxy-2'-fluoro
  misc_feature (20)..(21): internucleotide phosphorothioate linkage
ucuacgagaccucccggggnn

SEQ ID NO: 1606 - RNA, 21 nt, Artificial Sequence
  Description of Artificial Sequence: siNA antisense
  misc_feature (5)..(10): 2'-deoxy-2'-fluoro
  misc_feature (15)..(15): 2'-deoxy-2'-fluoro
  misc_feature (17)..(19): 2'-deoxy-2'-fluoro
  misc_feature (20)..(21): internucleotide phosphorothioate linkage
ggggcccuccagagcaucunn

SEQ ID NO: 1607 - RNA, 21 nt, Artificial Sequence
  Description of Artificial Sequence: siNA sense
  misc_feature (1)..(1): 5'-3 attached terminal deoxyabasic moiety
  misc_feature (1)..(4): 2'-deoxy-2'-fluoro
  misc_feature (5)..(10): 2'-deoxy
  misc_feature (11)..(14): 2'-deoxy-2'-fluoro
  misc_feature (15)..(15): 2'-deoxy
  misc_feature (16)..(16): 2'-deoxy-2'-fluoro
  misc_feature (17)..(19): 2'-deoxy
  misc_feature (20)..(20): n is thymidine
  misc_feature (21)..(21): 3'-3 attached terminal deoxyabasic moiety
ccccgggaggucucguagann

SEQ ID NO: 1608 - RNA, 21 nt, Artificial Sequence
  Description of Artificial Sequence: siNA sense
  misc_feature (1)..(1): 5'-3 attached terminal deoxyabasic moiety
  misc_feature (1)..(3): 2'-deoxy
  misc_feature (4)..(4): 2'-deoxy-2'-fluoro
  misc_feature (5)..(5): 2'-deoxy
  misc_feature (6)..(9): 2'-deoxy-2'-fluoro
  misc_feature (10)..(15): 2'-deoxy
  misc_feature (16)..(19): 2'-deoxy-2'-fluoro
  misc_feature (20)..(20): n is thymidine
  misc_feature (21)..(21): 3'-3 attached terminal deoxyabasic moiety
agaugcucuggagggccccnn

SEQ ID NO: 1609 - RNA, 21 nt, Artificial Sequence
  Description of Artificial Sequence: siNA antisense
  misc_feature (1)..(4): 2'-O-methyl
  misc_feature (5)..(10): 2'-deoxy-2'-fluoro
  misc_feature (11)..(14): 2'-O-methyl
  misc_feature (15)..(15): 2'-deoxy-2'-fluoro
  misc_feature (16)..(16): 2'-O-methyl
  misc_feature (17)..(19): 2'-deoxy-2'-fluoro
  misc_feature (20)..(21): internucleotide phosphorothioate linkage
ggggcccuccagagcaucunn

SEQ ID NO: 1610 - RNA, 21 nt, Artificial Sequence
  Description of Artificial Sequence: siNA antisense
  misc_feature: 2'-deoxy-2'-fluoro
  misc_feature (1)..(3): 2'-deoxy-2'-fluoro
  misc_feature (5)..(5): 2'-deoxy-2'-fluoro
  misc_feature (10)..(15): 2'-deoxy-2'-fluoro
  misc_feature (20)..(21): internucleotide phosphorothioate linkage
ucuacgagaccucccggggnn

SEQ ID NO: 1611 - RNA, 21 nt, Artificial Sequence
  Description of Artificial Sequence: siNA antisense
  misc_feature (1)..(4): 2'-deoxy
  misc_feature (5)..(10): 2'-deoxy-2'-fluoro
  misc_feature (11)..(14): 2'-deoxy
  misc_feature (15)..(15): 2'-deoxy-2'-fluoro
  misc_feature (16)..(16): 2'-deoxy
  misc_feature (17)..(19): 2'-deoxy-2'-fluoro
  misc_feature (20)..(21): internucleotide phosphorothioate linkage
ggggcccuccagagcaucunn

SEQ ID NO: 1612 - RNA, 21 nt, Artificial Sequence
  Description of Artificial Sequence: siNA sense
  misc_feature (1)..(1): 5'-3 attached terminal deoxyabasic moiety
  misc_feature (3)..(3): 2'-deoxy-2'-fluoro
  misc_feature (6)..(8): 2'-deoxy-2'-fluoro
  misc_feature (10)..(10): 2'-deoxy-2'-fluoro
  misc_feature (15)..(16): 2'-deoxy-2'-fluoro
  misc_feature (19)..(19): 2'-deoxy-2'-fluoro
  misc_feature (20)..(20): n is thymidine
  misc_feature (21)..(21): 3'-3 attached terminal deoxyabasic moiety
aguggucugcggaaccggunn

SEQ ID NO: 1613 - RNA, 21 nt, Artificial Sequence
  Description of Artificial Sequence: siNA sense
  misc_feature (1)..(1): 5'-3 attached terminal deoxyabasic moiety
  misc_feature (1)..(2): 2'-deoxy-2'-fluoro
  misc_feature (4)..(4): 2'-deoxy-2'-fluoro
  misc_feature (9)..(10): 2'-deoxy-2'-fluoro
  misc_feature (13)..(13): 2'-deoxy-2'-fluoro
  misc_feature (17)..(17): 2'-deoxy-2'-fluoro
  misc_feature (19)..(19): 2'-deoxy-2'-fluoro
  misc_feature (20)..(20): n is thymidine
  misc_feature (21)..(21): 3'-3 attached terminal deoxyabasic moiety
cugcggaaccggugaguacnn

SEQ ID NO: 1614 - RNA, 21 nt, Artificial Sequence
  Description of Artificial Sequence: siNA sense
  misc_feature (1)..(1): 5'-3 attached terminal deoxyabasic moiety
  misc_feature (4)..(7): 2'-deoxy-2'-fluoro
  misc_feature (9)..(9): 2'-deoxy-2'-fluoro
  misc_feature (12)..(12): 2'-deoxy-2'-fluoro
  misc_feature (14)..(15): 2'-deoxy-2'-fluoro
  misc_feature (17)..(19): 2'-deoxy-2'-fluoro
  misc_feature (20)..(20): n is thymidine
  misc_feature (21)..(21): 3'-3 attached terminal deoxyabasic moiety
aggccuugugguacugccunn

SEQ ID NO: 1615 - RNA, 21 nt, Artificial Sequence
  Description of Artificial Sequence: siNA sense
  misc_feature (1)..(1): 5'-3 attached terminal deoxyabasic moiety
  misc_feature (1)..(3): 2'-deoxy-2'-fluoro
  misc_feature (5)..(5): 2'-deoxy-2'-fluoro
  misc_feature (8)..(8): 2'-deoxy-2'-fluoro
  misc_feature (10)..(11): 2'-deoxy-2'-fluoro
  misc_feature (13)..(15): 2'-deoxy-2'-fluoro
  misc_feature (18)..(18): 2'-deoxy-2'-fluoro
  misc_feature (20)..(20): n is thymidine
  misc_feature (21)..(21): 3'-3 attached terminal deoxyabasic moiety
cuugugguacugccugauann

SEQ ID NO: 1616 - RNA, 21 nt, Artificial Sequence
  Description of Artificial Sequence: siNA sense
  misc_feature (1)..(1): 5'-3 attached terminal deoxyabasic moiety
  misc_feature (1)..(1): 2'-deoxy-2'-fluoro
  misc_feature (4)..(4): 2'-deoxy-2'-fluoro
  misc_feature (6)..(7): 2'-deoxy-2'-fluoro
  misc_feature (9)..(11): 2'-deoxy-2'-fluoro
  misc_feature (14)..(14): 2'-deoxy-2'-fluoro
  misc_feature (19)..(19): 2'-deoxy-2'-fluoro
  misc_feature (20)..(20): n is thymidine
  misc_feature (21)..(21): 3'-3 attached terminal deoxyabasic moiety
ugguacugccugauagggunn

SEQ ID NO: 1617 - RNA, 21 nt, Artificial Sequence
  Description of Artificial Sequence: siNA sense
  misc_feature (1)..(1): 5'-3 attached terminal deoxyabasic moiety
  misc_feature (3)..(3): 2'-deoxy-2'-fluoro
  misc_feature (5)..(6): 2'-deoxy-2'-fluoro
  misc_feature (8)..(10): 2'-deoxy-2'-fluoro
  misc_feature (13)..(13): 2'-deoxy-2'-fluoro
  misc_feature (18)..(18): 2'-deoxy-2'-fluoro
  misc_feature (20)..(20): n is thymidine
  misc_feature (21)..(21): 3'-3 attached terminal deoxyabasic moiety
gguacugccugauagggugnn

SEQ ID NO: 1618 - RNA, 21 nt, Artificial Sequence
  Description of Artificial Sequence: siNA sense
  misc_feature (1)..(1): 5'-3 attached terminal deoxyabasic moiety
  misc_feature (2)..(2): 2'-deoxy-2'-fluoro
  misc_feature (4)..(5): 2'-deoxy-2'-fluoro
  misc_feature (7)..(9): 2'-deoxy-2'-fluoro
  misc_feature (12)..(12): 2'-deoxy-2'-fluoro
  misc_feature (17)..(17): 2'-deoxy-2'-fluoro
  misc_feature (19)..(19): 2'-deoxy-2'-fluoro
  misc_feature (20)..(20): n is thymidine
  misc_feature (21)..(21): 3'-3 attached terminal deoxyabasic moiety
guacugccugauagggugcnn

SEQ ID NO: 1619 - RNA, 21 nt, Artificial Sequence
  Description of Artificial Sequence: siNA sense
  misc_feature (1)..(1): 5'-3 attached terminal deoxyabasic moiety
  misc_feature (1)..(1): 2'-deoxy-2'-fluoro
  misc_feature (3)..(4): 2'-deoxy-2'-fluoro
  misc_feature (6)..(8): 2'-deoxy-2'-fluoro
  misc_feature (11)..(11): 2'-deoxy-2'-fluoro
  misc_feature (16)..(16): 2'-deoxy-2'-fluoro
  misc_feature (18)..(19): 2'-deoxy-2'-fluoro
  misc_feature (20)..(20): n is thymidine
  misc_feature (21)..(21): 3'-3 attached terminal deoxyabasic moiety
uacugccugauagggugcunn

SEQ ID NO: 1620 - RNA, 21 nt, Artificial Sequence
  Description of Artificial Sequence: siNA sense
  misc_feature (1)..(1): 5'-3 attached terminal deoxyabasic moiety
  misc_feature (1)..(2): 2'-deoxy-2'-fluoro
  misc_feature (4)..(6): 2'-deoxy-2'-fluoro
  misc_feature (9)..(9): 2'-deoxy-2'-fluoro
  misc_feature (14)..(14): 2'-deoxy-2'-fluoro
  misc_feature (16)..(18): 2'-deoxy-2'-fluoro
  misc_feature (20)..(20): n is thymidine
  misc_feature (21)..(21): 3'-3 attached terminal deoxyabasic moiety
cugccugauagggugcuugnn

SEQ ID NO: 1621 - RNA, 21 nt, Artificial Sequence
  Description of Artificial Sequence: siNA sense
  misc_feature (1)..(1): 5'-3 attached terminal deoxyabasic moiety
  misc_feature (1)..(1): 2'-deoxy-2'-fluoro
  misc_feature (3)..(5): 2'-deoxy-2'-fluoro
  misc_feature (8)..(8): 2'-deoxy-2'-fluoro
  misc_feature (13)..(13): 2'-deoxy-2'-fluoro
  misc_feature (15)..(17): 2'-deoxy-2'-fluoro
  misc_feature (19)..(19): 2'-deoxy-2'-fluoro
  misc_feature (20)..(20): n is thymidine
  misc_feature (21)..(21): 3'-3 attached terminal deoxyabasic moiety
ugccugauagggugcuugcnn

SEQ ID NO: 1622 - RNA, 21 nt, Artificial Sequence
  Description of Artificial Sequence: siNA sense
  misc_feature (1)..(1): 5'-3 attached terminal deoxyabasic moiety
  misc_feature (1)..(3): 2'-deoxy-2'-fluoro
  misc_feature (6)..(6): 2'-deoxy-2'-fluoro
  misc_feature (11)..(11): 2'-deoxy-2'-fluoro
  misc_feature (13)..(15): 2'-deoxy-2'-fluoro
  misc_feature (17)..(17): 2'-deoxy-2'-fluoro
  misc_feature (20)..(20): n is thymidine
  misc_feature (21)..(21): 3'-3 attached terminal deoxyabasic moiety
ccugauagggugcuugcgann

SEQ ID NO: 1623 - RNA, 21 nt, Artificial Sequence
  Description of Artificial Sequence: siNA sense
  misc_feature (1)..(1): 5'-3 attached terminal deoxyabasic moiety
  misc_feature (3)..(3): 2'-deoxy-2'-fluoro
  misc_feature (8)..(8): 2'-deoxy-2'-fluoro
  misc_feature (10)..(12): 2'-deoxy-2'-fluoro
  misc_feature (14)..(14): 2'-deoxy-2'-fluoro
  misc_feature (18)..(18): 2'-deoxy-2'-fluoro
  misc_feature (20)..(20): n is thymidine
  misc_feature (21)..(21): 3'-3 attached terminal deoxyabasic moiety
gauagggugcuugcgagugnn

SEQ ID NO: 1624 - RNA, 21 nt, Artificial Sequence
  Description of Artificial Sequence: siNA antisense
  misc_feature (2)..(3): 2'-deoxy-2'-fluoro
  misc_feature (6)..(9): 2'-deoxy-2'-fluoro
  misc_feature (11)..(11): 2'-deoxy-2'-fluoro
  misc_feature (15)..(16): 2'-deoxy-2'-fluoro
  misc_feature (18)..(19): 2'-deoxy-2'-fluoro
  misc_feature (20)..(21): internucleotide phosphorothioate linkage
accgguuccgcagaccacunn

SEQ ID NO: 1625 - RNA, 21 nt, Artificial Sequence
  Description of Artificial Sequence: siNA antisense
  misc_feature (2)..(2): 2'-deoxy-2'-fluoro
  misc_feature (4)..(6): 2'-deoxy-2'-fluoro
  misc_feature (8)..(9): 2'-deoxy-2'-fluoro
  misc_feature (12)..(15): 2'-deoxy-2'-fluoro
  misc_feature (17)..(17): 2'-deoxy-2'-fluoro
  misc_feature (20)..(21): internucleotide phosphorothioate linkage
guacucaccgguuccgcagnn

SEQ ID NO: 1626 - RNA, 21 nt, Artificial Sequence
  Description of Artificial Sequence: siNA antisense
  misc_feature (4)..(4): 2'-deoxy-2'-fluoro
  misc_feature (7)..(7): 2'-deoxy-2'-fluoro
  misc_feature (9)..(10): 2'-deoxy-2'-fluoro
  misc_feature (12)..(12): 2'-deoxy-2'-fluoro
  misc_feature (17)..(19): 2'-deoxy-2'-fluoro
  misc_feature (20)..(21): internucleotide phosphorothioate linkage
aggcaguaccacaaggccunn

SEQ ID NO: 1627 - RNA, 21 nt, Artificial Sequence
  Description of Artificial Sequence: siNA antisense
  misc_feature (1)..(1): 2'-deoxy-2'-fluoro
  misc_feature (3)..(4): 2'-deoxy-2'-fluoro
  misc_feature (8)..(8): 2'-deoxy-2'-fluoro
  misc_feature (11)..(11): 2'-deoxy-2'-fluoro
  misc_feature (13)..(14): 2'-deoxy-2'-fluoro
  misc_feature (16)..(16): 2'-deoxy-2'-fluoro
  misc_feature (20)..(21): internucleotide phosphorothioate linkage
uaucaggcaguaccacaagnn

SEQ ID NO: 1628 - RNA, 21 nt, Artificial Sequence
  Description of Artificial Sequence: siNA antisense
  misc_feature (2)..(5): 2'-deoxy-2'-fluoro
  misc_feature (7)..(8): 2'-deoxy-2'-fluoro
  misc_feature (12)..(12): 2'-deoxy-2'-fluoro
  misc_feature (15)..(15): 2'-deoxy-2'-fluoro
  misc_feature (17)..(18): 2'-deoxy-2'-fluoro
  misc_feature (20)..(21): internucleotide phosphorothioate linkage
acccuaucaggcaguaccann

SEQ ID NO: 1629 - RNA, 21 nt, Artificial Sequence
  Description of Artificial Sequence: siNA antisense
  misc_feature (1)..(1): 2'-deoxy-2'-fluoro
  misc_feature (3)..(6): 2'-deoxy-2'-fluoro
  misc_feature (8)..(9): 2'-deoxy-2'-fluoro
  misc_feature (13)..(13): 2'-deoxy-2'-fluoro
  misc_feature (16)..(16): 2'-deoxy-2'-fluoro
  misc_feature (18)..(19): 2'-deoxy-2'-fluoro
  misc_feature (20)..(21): internucleotide phosphorothioate linkage
cacccuaucaggcaguaccnn

SEQ ID NO: 1630 - RNA, 21 nt, Artificial Sequence
  Description of Artificial Sequence: siNA antisense
  misc_feature (2)..(2): 2'-deoxy-2'-fluoro
  misc_feature (4)..(7): 2'-deoxy-2'-fluoro
  misc_feature (9)..(10): 2'-deoxy-2'-fluoro
  misc_feature (14)..(14): 2'-deoxy-2'-fluoro
  misc_feature (17)..(17): 2'-deoxy-2'-fluoro
  misc_feature (19)..(19): 2'-deoxy-2'-fluoro
  misc_feature (20)..(21): internucleotide phosphorothioate linkage
gcacccuaucaggcaguacnn

SEQ ID NO: 1631 - RNA, 21 nt, Artificial Sequence
  Description of Artificial Sequence: siNA antisense
  misc_feature (3)..(3): 2'-deoxy-2'-fluoro
  misc_feature (5)..(8): 2'-deoxy-2'-fluoro
  misc_feature (10)..(11): 2'-deoxy-2'-fluoro
  misc_feature (15)..(15): 2'-deoxy-2'-fluoro
  misc_feature (18)..(18): 2'-deoxy-2'-fluoro
  misc_feature (20)..(21): internucleotide phosphorothioate linkage
agcacccuaucaggcaguann

SEQ ID NO: 1632 - RNA, 21 nt, Artificial Sequence
  Description of Artificial Sequence: siNA antisense
  misc_feature (1)..(1): 2'-deoxy-2'-fluoro
  misc_feature (5)..(5): 2'-deoxy-2'-fluoro
  misc_feature (7)..(10): 2'-deoxy-2'-fluoro
  misc_feature (12)..(13): 2'-deoxy-2'-fluoro
  misc_feature (17)..(17): 2'-deoxy-2'-fluoro
  misc_feature (20)..(21): internucleotide phosphorothioate linkage
caagcacccuaucaggcagnn

SEQ ID NO: 1633 - RNA, 21 nt, Artificial Sequence
  Description of Artificial Sequence: siNA antisense
  misc_feature (2)..(2): 2'-deoxy-2'-fluoro
  misc_feature (6)..(6): 2'-deoxy-2'-fluoro
  misc_feature (8)..(11): 2'-deoxy-2'-fluoro
  misc_feature (13)..(14): 2'-deoxy-2'-fluoro
  misc_feature (18)..(18): 2'-deoxy-2'-fluoro
  misc_feature (20)..(21): internucleotide phosphorothioate linkage
gcaagcacccuaucaggcann

SEQ ID NO: 1634 - RNA, 21 nt, Artificial Sequence
  Description of Artificial Sequence: siNA antisense
  misc_feature (1)..(2): 2'-deoxy-2'-fluoro
  misc_feature (4)..(4): 2'-deoxy-2'-fluoro
  misc_feature (8)..(8): 2'-deoxy-2'-fluoro
  misc_feature (10)..(13): 2'-deoxy-2'-fluoro
  misc_feature (15)..(16): 2'-deoxy-2'-fluoro
  misc_feature (20)..(21): internucleotide phosphorothioate linkage
ucgcaagcacccuaucaggnn

SEQ ID NO: 1635 - RNA, 21 nt, Artificial Sequence
  Description of Artificial Sequence: siNA antisense
  misc_feature (1)..(1): 2'-deoxy-2'-fluoro
  misc_feature (3)..(5): 2'-deoxy-2'-fluoro
  misc_feature (7)..(7): 2'-deoxy-2'-fluoro
  misc_feature (11)..(11): 2'-deoxy-2'-fluoro
  misc_feature (13)..(16): 2'-deoxy-2'-fluoro
  misc_feature (18)..(19): 2'-deoxy-2'-fluoro
  misc_feature (20)..(21): internucleotide phosphorothioate linkage
cacucgcaagcacccuaucnn

SEQ ID NO: 1636 - RNA, 21 nt, Artificial Sequence
  Description of Artificial Sequence: siNA sense
  misc_feature (1)..(1): 5'-3 attached terminal deoxyabasic moiety
  misc_feature (1)..(1): 2'-deoxy-2'-fluoro
  misc_feature (4)..(5): 2'-deoxy-2'-fluoro
  misc_feature (10)..(10): 2'-deoxy-2'-fluoro
  misc_feature (12)..(14): 2'-deoxy-2'-fluoro
  misc_feature (17)..(17): 2'-deoxy-2'-fluoro
  misc_feature (20)..(20): n is thymidine
  misc_feature (21)..(21): 3'-3 attached terminal deoxyabasic moiety
uggccaaggcgucuggugann

SEQ ID NO: 1637 - RNA, 21 nt, Artificial Sequence
  Description of Artificial Sequence: siNA sense
  misc_feature (1)..(1): 5'-3 attached terminal deoxyabasic moiety
  misc_feature (1)..(1): 2'-deoxy-2'-fluoro
  misc_feature (3)..(3): 2'-deoxy-2'-fluoro
  misc_feature (7)..(7): 2'-deoxy-2'-fluoro
  misc_feature (10)..(11): 2'-deoxy-2'-fluoro
  misc_feature (16)..(16): 2'-deoxy-2'-fluoro
  misc_feature (18)..(19): 2'-deoxy-2'-fluoro
  misc_feature (20)..(20): n is thymidine
  misc_feature (21)..(21): 3'-3 attached terminal deoxyabasic moiety
caugaguggccaaggcgucnn

SEQ ID NO: 1638 - RNA, 21 nt, Artificial Sequence
  Description of Artificial Sequence: siNA sense
  misc_feature (1)..(1): 5'-3 attached terminal deoxyabasic moiety
  misc_feature (1)..(3): 2'-deoxy-2'-fluoro
  misc_feature (5)..(6): 2'-deoxy-2'-fluoro
  misc_feature (8)..(8): 2'-deoxy-2'-fluoro
  misc_feature (11)..(11): 2'-deoxy-2'-fluoro
  misc_feature (13)..(16): 2'-deoxy-2'-fluoro
  misc_feature (20)..(20): n is thymidine
  misc_feature (21)..(21): 3'-3 attached terminal deoxyabasic moiety
uccgucaugguguuccggann

SEQ ID NO: 1639 - RNA, 21 nt, Artificial Sequence
  Description of Artificial Sequence: siNA sense
  misc_feature (1)..(1): 5'-3 attached terminal deoxyabasic moiety
  misc_feature (2)..(2): 2'-deoxy-2'-fluoro
  misc_feature (5)..(7): 2'-deoxy-2'-fluoro
  misc_feature (9)..(10): 2'-deoxy-2'-fluoro
  misc_feature (12)..(12): 2'-deoxy-2'-fluoro
  misc_feature (15)..(15): 2'-deoxy-2'-fluoro
  misc_feature (17)..(19): 2'-deoxy-2'-fluoro
  misc_feature (20)..(20): n is thymidine
  misc_feature (21)..(21): 3'-3 attached terminal deoxyabasic moiety
auaguccgucaugguguucnn

SEQ ID NO: 1640 - RNA, 21 nt, Artificial Sequence
  Description of Artificial Sequence: siNA sense
  misc_feature (1)..(1): 5'-3 attached terminal deoxyabasic moiety
  misc_feature (1)..(1): 2'-deoxy-2'-fluoro
  misc_feature (6)..(6): 2'-deoxy-2'-fluoro
  misc_feature (8)..(11): 2'-deoxy-2'-fluoro
  misc_feature (13)..(14): 2'-deoxy-2'-fluoro
  misc_feature (16)..(16): 2'-deoxy-2'-fluoro
  misc_feature (19)..(19): 2'-deoxy-2'-fluoro
  misc_feature (20)..(20): n is thymidine
  misc_feature (21)..(21): 3'-3 attached terminal deoxyabasic moiety
ugggauaguccgucauggunn

SEQ ID NO: 1641 - RNA, 21 nt, Artificial Sequence
  Description of Artificial Sequence: siNA sense
  misc_feature (1)..(1): 5'-3 attached terminal deoxyabasic moiety
  misc_feature (2)..(2): 2'-deoxy-2'-fluoro
  misc_feature (7)..(7): 2'-deoxy-2'-fluoro
  misc_feature (10)..(12): 2'-deoxy-2'-fluoro
  misc_feature (14)..(15): 2'-deoxy-2'-fluoro
  misc_feature (17)..(17): 2'-deoxy-2'-fluoro
  misc_feature (20)..(20): n is thymidine
  misc_feature (21)..(21): 3'-3 attached terminal deoxyabasic moiety
gugggauaguccgucauggnn

SEQ ID NO: 1642 - RNA, 21 nt, Artificial Sequence
  Description of Artificial Sequence: siNA sense
  misc_feature (1)..(1): 5'-3 attached terminal deoxyabasic moiety
  misc_feature (1)..(1): 2'-deoxy-2'-fluoro
  misc_feature (3)..(3): 2'-deoxy-2'-fluoro
  misc_feature (8)..(8): 2'-deoxy-2'-fluoro
  misc_feature (11)..(13): 2'-deoxy-2'-fluoro
  misc_feature (15)..(16): 2'-deoxy-2'-fluoro
  misc_feature (18)..(18): 2'-deoxy-2'-fluoro
  misc_feature (20)..(20): n is thymidine
  misc_feature (21)..(21): 3'-3 attached terminal deoxyabasic moiety
cgugggauaguccgucaugnn

SEQ ID NO: 1643 - RNA, 21 nt, Artificial Sequence
  Description of Artificial Sequence: siNA sense
  misc_feature (1)..(1): 5'-3 attached terminal deoxyabasic moiety
  misc_feature (1)..(2): 2'-deoxy-2'-fluoro
  misc_feature (4)..(4): 2'-deoxy-2'-fluoro
  misc_feature (9)..(9): 2'-deoxy-2'-fluoro
  misc_feature (12)..(14): 2'-deoxy-2'-fluoro
  misc_feature (16)..(17): 2'-deoxy-2'-fluoro
  misc_feature (19)..(19): 2'-deoxy-2'-fluoro
  misc_feature (20)..(20): n is thymidine
  misc_feature (21)..(21): 3'-3 attached terminal deoxyabasic moiety
ucgugggauaguccgucaunn

SEQ ID NO: 1644 - RNA, 21 nt, Artificial Sequence
  Description of Artificial Sequence: siNA sense
  misc_feature (1)..(1): 5'-3 attached terminal deoxyabasic moiety
  misc_feature (2)..(4): 2'-deoxy-2'-fluoro
  misc_feature (6)..(6): 2'-deoxy-2'-fluoro
  misc_feature (11)..(11): 2'-deoxy-2'-fluoro
  misc_feature (14)..(16): 2'-deoxy-2'-fluoro
  misc_feature (18)..(19): 2'-deoxy-2'-fluoro
  misc_feature (20)..(20): n is thymidine
  misc_feature (21)..(21): 3'-3 attached terminal deoxyabasic moiety
guucgugggauaguccgucnn

SEQ ID NO: 1645 - RNA, 21 nt, Artificial Sequence
  Description of Artificial Sequence: siNA sense
  misc_feature (1)..(1): 5'-3 attached terminal deoxyabasic moiety
  misc_feature (1)..(1): 2'-deoxy-2'-fluoro
  misc_feature (3)..(5): 2'-deoxy-2'-fluoro
  misc_feature (7)..(7): 2'-deoxy-2'-fluoro
  misc_feature (12)..(12): 2'-deoxy-2'-fluoro
  misc_feature (15)..(17): 2'-deoxy-2'-fluoro
  misc_feature (19)..(19): 2'-deoxy-2'-fluoro
  misc_feature (20)..(20): n is thymidine
  misc_feature (21)..(21): 3'-3 attached terminal deoxyabasic moiety
cguucgugggauaguccgunn

SEQ ID NO: 1646 - RNA, 21 nt, Artificial Sequence
  Description of Artificial Sequence: siNA sense
  misc_feature (1)..(1): 5'-3 attached terminal deoxyabasic moiety
  misc_feature (3)..(3): 2'-deoxy-2'-fluoro
  misc_feature (5)..(7): 2'-deoxy-2'-fluoro
  misc_feature (9)..(9): 2'-deoxy-2'-fluoro
  misc_feature (14)..(14): 2'-deoxy-2'-fluoro
  misc_feature (17)..(19): 2'-deoxy-2'-fluoro
  misc_feature (20)..(20): n is thymidine
  misc_feature (21)..(21): 3'-3 attached terminal deoxyabasic moiety
agcguucgugggauaguccnn

SEQ ID NO: 1647 - RNA, 21 nt, Artificial Sequence
  Description of Artificial Sequence: siNA sense
  misc_feature (1)..(1): 5'-3 attached terminal deoxyabasic moiety
  misc_feature (2)..(2): 2'-deoxy-2'-fluoro
  misc_feature (6)..(6): 2'-deoxy-2'-fluoro
  misc_feature (8)..(10): 2'-deoxy-2'-fluoro
  misc_feature (12)..(12): 2'-deoxy-2'-fluoro
  misc_feature (17)..(17): 2'-deoxy-2'-fluoro
  misc_feature (20)..(20): n is thymidine
  misc_feature (21)..(21): 3'-3 attached terminal deoxyabasic moiety
gugagcguucgugggauagnn

SEQ ID NO: 1648 - RNA, 21 nt, Artificial Sequence
  Description of Artificial Sequence: siNA antisense
  misc_feature (1)..(2): 2'-deoxy-2'-fluoro
  misc_feature (4)..(5): 2'-deoxy-2'-fluoro
  misc_feature (9)..(9): 2'-deoxy-2'-fluoro
  misc_feature (11)..(14): 2'-deoxy-2'-fluoro
  misc_feature (17)..(18): 2'-deoxy-2'-fluoro
  misc_feature (20)..(21): internucleotide phosphorothioate linkage
ucaccagacgccuuggccann

SEQ ID NO: 1649 - RNA, 21 nt, Artificial Sequence
  Description of Artificial Sequence: siNA antisense
  misc_feature (2)..(3): 2'-deoxy-2'-fluoro
  misc_feature (5)..(8): 2'-deoxy-2'-fluoro
  misc_feature (11)..(12): 2'-deoxy-2'-fluoro
  misc_feature (14)..(16): 2'-deoxy-2'-fluoro
  misc_feature (18)..(18): 2'-deoxy-2'-fluoro
  misc_feature (20)..(21): internucleotide phosphorothioate linkage
gacgccuuggccacucaugnn

SEQ ID NO: 1650 - RNA, 21 nt, Artificial Sequence
  Description of Artificial Sequence: siNA antisense
  misc_feature (1)..(3): 2'-deoxy-2'-fluoro
  misc_feature (8)..(8): 2'-deoxy-2'-fluoro
  misc_feature (10)..(11): 2'-deoxy-2'-fluoro
  misc_feature (13)..(13): 2'-deoxy-2'-fluoro
  misc_feature (16)..(16): 2'-deoxy-2'-fluoro
  misc_feature (20)..(21): internucleotide phosphorothioate linkage
uccggaacaccaugacggann

SEQ ID NO: 1651 - RNA, 21 nt, Artificial Sequence
  Description of Artificial Sequence: siNA antisense
  misc_feature (4)..(4): 2'-deoxy-2'-fluoro
  misc_feature (6)..(7): 2'-deoxy-2'-fluoro
  misc_feature (9)..(9): 2'-deoxy-2'-fluoro
  misc_feature (12)..(12): 2'-deoxy-2'-fluoro
  misc_feature (16)..(17): 2'-deoxy-2'-fluoro
  misc_feature (19)..(19): 2'-deoxy-2'-fluoro
  misc_feature (20)..(21): internucleotide phosphorothioate linkage
gaacaccaugacggacuaunn

SEQ ID NO: 1652 - RNA, 21 nt, Artificial Sequence
  Description of Artificial Sequence: siNA antisense
  misc_feature (2)..(3): 2'-deoxy-2'-fluoro
  misc_feature (5)..(5): 2'-deoxy-2'-fluoro
  misc_feature (8)..(8): 2'-deoxy-2'-fluoro
  misc_feature (12)..(13): 2'-deoxy-2'-fluoro
  misc_feature (15)..(18): 2'-deoxy-2'-fluoro
  misc_feature (20)..(21): internucleotide phosphorothioate linkage
accaugacggacuaucccann

SEQ ID NO: 1653 - RNA, 21 nt, Artificial Sequence
  Description of Artificial Sequence: siNA antisense
  misc_feature (1)..(2): 2'-deoxy-2'-fluoro
  misc_feature (4)..(4): 2'-deoxy-2'-fluoro
  misc_feature (7)..(7): 2'-deoxy-2'-fluoro
  misc_feature (11)..(12): 2'-deoxy-2'-fluoro
  misc_feature (14)..(17): 2'-deoxy-2'-fluoro
  misc_feature (19)..(19): 2'-deoxy-2'-fluoro
  misc_feature (20)..(21): internucleotide phosphorothioate linkage
ccaugacggacuaucccacnn

SEQ ID NO: 1654 - RNA, 21 nt, Artificial Sequence
  Description of Artificial Sequence: siNA antisense
  misc_feature (1)..(1): 2'-deoxy-2'-fluoro
  misc_feature (3)..(3): 2'-deoxy-2'-fluoro
  misc_feature (6)..(6): 2'-deoxy-2'-fluoro
  misc_feature (10)..(11): 2'-deoxy-2'-fluoro
  misc_feature (13)..(16): 2'-deoxy-2'-fluoro
  misc_feature (18)..(18): 2'-deoxy-2'-fluoro
  misc_feature (20)..(21): internucleotide phosphorothioate linkage
caugacggacuaucccacgnn

SEQ ID NO: 1655 - RNA, 21 nt, Artificial Sequence
  Description of Artificial Sequence: siNA antisense
  misc_feature (2)..(2): 2'-deoxy-2'-fluoro
  misc_feature (5)..(5): 2'-deoxy-2'-fluoro
  misc_feature (9)..(10): 2'-deoxy-2'-fluoro
  misc_feature (12)..(15): 2'-deoxy-2'-fluoro
  misc_feature (17)..(17): 2'-deoxy-2'-fluoro
  misc_feature (20)..(21): internucleotide phosphorothioate linkage
augacggacuaucccacgann

SEQ ID NO: 1656 - RNA, 21 nt, Artificial Sequence
  Description of Artificial Sequence: siNA antisense
  misc_feature (3)..(3): 2'-deoxy-2'-fluoro
  misc_feature (7)..(8): 2'-deoxy-2'-fluoro
  misc_feature (10)..(13): 2'-deoxy-2'-fluoro
  misc_feature (15)..(15): 2'-deoxy-2'-fluoro
  misc_feature (19)..(19): 2'-deoxy-2'-fluoro
  misc_feature (20)..(21): internucleotide phosphorothioate linkage
gacggacuaucccacgaacnn

SEQ ID NO: 1657 - RNA, 21 nt, Artificial Sequence
  Description of Artificial Sequence: siNA antisense
  misc_feature (2)..(2): 2'-deoxy-2'-fluoro
  misc_feature (6)..(7): 2'-deoxy-2'-fluoro
  misc_feature (9)..(12): 2'-deoxy-2'-fluoro
  misc_feature (14)..(14): 2'-deoxy-2'-fluoro
  misc_feature (18)..(18): 2'-deoxy-2'-fluoro
  misc_feature (20)..(21): internucleotide phosphorothioate linkage
acggacuaucccacgaacgnn

SEQ ID NO: 1658 - RNA, 21 nt, Artificial Sequence
  Description of Artificial Sequence: siNA antisense
  misc_feature (4)..(5): 2'-deoxy-2'-fluoro
  misc_feature (7)..(10): 2'-deoxy-2'-fluoro
  misc_feature (12)..(12): 2'-deoxy-2'-fluoro
  misc_feature (16)..(16): 2'-deoxy-2'-fluoro
  misc_feature (18)..(19): 2'-deoxy-2'-fluoro
  misc_feature (20)..(21): internucleotide phosphorothioate linkage
ggacuaucccacgaacgcunn

SEQ ID NO: 1659 - RNA, 21 nt, Artificial Sequence
  Description of Artificial Sequence: siNA antisense
  misc_feature (1)..(2): 2'-deoxy-2'-fluoro
  misc_feature (4)..(7): 2'-deoxy-2'-fluoro
  misc_feature (9)..(9): 2'-deoxy-2'-fluoro
  misc_feature (13)..(13): 2'-deoxy-2'-fluoro
  misc_feature (15)..(17): 2'-deoxy-2'-fluoro
  misc_feature (19)..(19): 2'-deoxy-2'-fluoro
  misc_feature (20)..(21): internucleotide phosphorothioate linkage
cuaucccacgaacgcucacnn

SEQ ID NO: 1660 - RNA, 21 nt, Artificial Sequence
  Description of Artificial Sequence: siNA sense
  misc_feature (1)..(1): 5'-3 attached terminal deoxyabasic moiety
  misc_feature (2)..(10): 2'-deoxy-2'-fluoro
  misc_feature (14)..(15): 2'-deoxy-2'-fluoro
  misc_feature (18)..(19): 2'-deoxy-2'-fluoro
  misc_feature (20)..(20): n is thymidine
  misc_feature (21)..(21): 3'-3 attached terminal deoxyabasic moiety
guccuuucuuggaucaaccnn

SEQ ID NO: 1661 - RNA, 21 nt, Artificial Sequence
  Description of Artificial Sequence: siNA sense
  misc_feature (1)..(1): 5'-3 attached terminal deoxyabasic moiety
  misc_feature (1)..(9): 2'-deoxy-2'-fluoro
  misc_feature (13)..(14): 2'-deoxy-2'-fluoro
  misc_feature (17)..(19): 2'-deoxy-2'-fluoro
  misc_feature (20)..(20): n is thymidine
  misc_feature (21)..(21): 3'-3 attached terminal deoxyabasic moiety
uccuuucuuggaucaacccnn

SEQ ID NO: 1662 - RNA, 21 nt, Artificial Sequence
  Description of Artificial Sequence: siNA sense
  misc_feature (1)..(1): 5'-3 attached terminal deoxyabasic moiety
  misc_feature (3)..(11): 2'-deoxy-2'-fluoro
  misc_feature (15)..(16): 2'-deoxy-2'-fluoro
  misc_feature (19)..(19): 2'-deoxy-2'-fluoro
  misc_feature (20)..(20): n is thymidine
  misc_feature (21)..(21): 3'-3 attached terminal deoxyabasic moiety
gguccuuucuuggaucaacnn

SEQ ID NO: 1663 - RNA, 21 nt, Artificial Sequence
  Description of Artificial Sequence: siNA sense
  misc_feature (1)..(1): 5'-3 attached terminal deoxyabasic moiety
  misc_feature (1)..(2): 2'-deoxy-2'-fluoro
  misc_feature (6)..(14): 2'-deoxy-2'-fluoro
  misc_feature (18)..(19): 2'-deoxy-2'-fluoro
  misc_feature (20)..(20): n is thymidine
  misc_feature (21)..(21): 3'-3 attached terminal deoxyabasic moiety
ccggguccuuucuuggaucnn

SEQ ID NO: 1664 - RNA, 21 nt, Artificial Sequence
  Description of Artificial Sequence: siNA antisense
  misc_feature (3)..(4): 2'-deoxy-2'-fluoro
  misc_feature (7)..(9): 2'-deoxy-2'-fluoro
  misc_feature (19)..(19): 2'-deoxy-2'-fluoro
  misc_feature (20)..(21): internucleotide phosphorothioate linkage
gguugauccaagaaaggacnn

SEQ ID NO: 1665 - RNA, 21 nt, Artificial Sequence
  Description of Artificial Sequence: siNA antisense
  misc_feature (4)..(5): 2'-deoxy-2'-fluoro
  misc_feature (8)..(10): 2'-deoxy-2'-fluoro
  misc_feature (20)..(21): internucleotide phosphorothioate linkage
ggguugauccaagaaaggann

SEQ ID NO: 1666 - RNA, 21 nt, Artificial Sequence
  Description of Artificial Sequence: siNA antisense
  misc_feature (2)..(3): 2'-deoxy-2'-fluoro
  misc_feature (6)..(8): 2'-deoxy-2'-fluoro
  misc_feature (18)..(19): 2'-deoxy-2'-fluoro
  misc_feature (20)..(21): internucleotide phosphorothioate linkage
guugauccaagaaaggaccnn

SEQ ID NO: 1667 - RNA, 21 nt, Artificial Sequence
  Description of Artificial Sequence: siNA antisense
  misc_feature (3)..(5): 2'-deoxy-2'-fluoro
  misc_feature (15)..(17): 2'-deoxy-2'-fluoro
  misc_feature (20)..(21): internucleotide phosphorothioate linkage
gauccaagaaaggacccggnn

SEQ ID NO: 1668 - RNA, 21 nt, Artificial Sequence
  Description of Artificial Sequence: siNA sense
  misc_feature (1)..(1): 5'-3 attached terminal deoxyabasic moiety
  misc_feature (1)..(2): 2'-deoxy-2'-fluoro
  misc_feature (5)..(6): 2'-deoxy-2'-fluoro
  misc_feature (10)..(18): 2'-deoxy-2'-fluoro
  misc_feature (20)..(20): n is thymidine
  misc_feature (21)..(21): 3'-3 attached terminal deoxyabasic moiety
ccaacuagguucuuuccugnn

SEQ ID NO: 1669 - RNA, 21 nt, Artificial Sequence
  Description of Artificial Sequence: siNA sense
  misc_feature (1)..(1): 5'-3 attached terminal deoxyabasic moiety
  misc_feature (1)..(3): 2'-deoxy-2'-fluoro
  misc_feature (6)..(7): 2'-deoxy-2'-fluoro
  misc_feature (11)..(19): 2'-deoxy-2'-fluoro
  misc_feature (20)..(20): n is thymidine
  misc_feature (21)..(21): 3'-3 attached terminal deoxyabasic moiety
cccaacuagguucuuuccunn

SEQ ID NO: 1670 - RNA, 21 nt, Artificial Sequence
  Description of Artificial Sequence: siNA sense
  misc_feature (1)..(1): 5'-3 attached terminal deoxyabasic moiety
  misc_feature (1)..(1): 2'-deoxy-2'-fluoro
  misc_feature (4)..(5): 2'-deoxy-2'-fluoro
  misc_feature (9)..(17): 2'-deoxy-2'-fluoro
  misc_feature (20)..(20): n is thymidine
  misc_feature (21)..(21): 3'-3 attached terminal deoxyabasic moiety
caacuagguucuuuccuggnn

SEQ ID NO: 1671 - RNA, 21 nt, Artificial Sequence
  Description of Artificial Sequence: siNA sense
  misc_feature (1)..(1): 5'-3 attached terminal deoxyabasic moiety
  misc_feature (1)..(2): 2'-deoxy-2'-fluoro
  misc_feature (6)..(14): 2'-deoxy-2'-fluoro
  misc_feature (18)..(19): 2'-deoxy-2'-fluoro
  misc_feature (20)..(20): n is thymidine
  misc_feature (21)..(21): 3'-3 attached terminal deoxyabasic moiety
cuagguucuuuccugggccnn

SEQ ID NO: 1672 - RNA, 21 nt, Artificial Sequence
  Description of Artificial Sequence: siNA antisense
  misc_feature (1)..(1): 2'-deoxy-2'-fluoro
  misc_feature (11)..(13): 2'-deoxy-2'-fluoro
  misc_feature (16)..(17): 2'-deoxy-2'-fluoro
  misc_feature (20)..(21): internucleotide phosphorothioate linkage
caggaaagaaccuaguuggnn

SEQ ID NO: 1673 - RNA, 21 nt, Artificial Sequence
  Description of Artificial Sequence: siNA antisense
  misc_feature (10)..(12): 2'-deoxy-2'-fluoro
  misc_feature (15)..(16): 2'-deoxy-2'-fluoro
  misc_feature (20)..(21): internucleotide phosphorothioate linkage
aggaaagaaccuaguugggnn

SEQ ID NO: 1674 - RNA, 21 nt, Artificial Sequence
  Description of Artificial Sequence: siNA antisense
  misc_feature (1)..(2): 2'-deoxy-2'-fluoro
  misc_feature (12)..(14): 2'-deoxy-2'-fluoro
  misc_feature (17)..(18): 2'-deoxy-2'-fluoro
  misc_feature (20)..(21): internucleotide phosphorothioate linkage
ccaggaaagaaccuaguugnn

SEQ ID NO: 1675 - RNA, 21 nt, Artificial Sequence
  Description of Artificial Sequence: siNA antisense
  misc_feature (3)..(5): 2'-deoxy-2'-fluoro
  misc_feature (15)..(17): 2'-deoxy-2'-fluoro
  misc_feature (20)..(21): internucleotide phosphorothioate linkage
ggcccaggaaagaaccuagnn

SEQ ID NO: 1676 - RNA, 21 nt, Artificial Sequence
  Description of Artificial Sequence: siNA sense
  misc_feature (1)..(1): 5'-3 attached terminal deoxyabasic moiety
  misc_feature (1)..(3): 2'-deoxy-2'-fluoro
  misc_feature (4)..(9): 2'-deoxy
  misc_feature (10)..(13): 2'-deoxy-2'-fluoro
  misc_feature (14)..(14): 2'-deoxy
  misc_feature (15)..(15): 2'-deoxy-2'-fluoro
  misc_feature (16)..(18): 2'-deoxy
  misc_feature (19)..(19): 2'-deoxy-2'-fluoro
  misc_feature (20)..(20): n is thymidine
  misc_feature (21)..(21): 3'-3 attached terminal deoxyabasic moiety
cccgggaggucucguagacnn

SEQ ID NO: 1677 - RNA, 21 nt, Artificial Sequence
  Description of Artificial Sequence: siNA sense
  misc_feature (1)..(1): 5'-3 attached terminal deoxyabasic moiety
  misc_feature (1)..(2): 2'-deoxy-2'-fluoro
  misc_feature (3)..(8): 2'-deoxy
  misc_feature (9)..(12): 2'-deoxy-2'-fluoro
  misc_feature (13)..(13): 2'-deoxy
  misc_feature (14)..(14): 2'-deoxy-2'-fluoro
  misc_feature (15)..(17): 2'-deoxy
  misc_feature (18)..(19): 2'-deoxy-2'-fluoro
  misc_feature (20)..(20): n is thymidine
  misc_feature (21)..(21): 3'-3 attached terminal deoxyabasic moiety
ccgggaggucucguagaccnn

SEQ ID NO: 1678 - RNA, 21 nt, Artificial Sequence
  Description of Artificial Sequence: siNA sense
  misc_feature (1)..(1): 5'-3 attached terminal deoxyabasic moiety
  misc_feature (1)..(1): 2'-deoxy-2'-fluoro
  misc_feature (2)..(7): 2'-deoxy
  misc_feature (8)..(11): 2'-deoxy-2'-fluoro
  misc_feature (12)..(12): 2'-deoxy
  misc_feature (13)..(13): 2'-deoxy-2'-fluoro
  misc_feature (14)..(16): 2'-deoxy
  misc_feature (17)..(18): 2'-deoxy-2'-fluoro
  misc_feature (19)..(19): 2'-deoxy
  misc_feature (20)..(20): n is thymidine
  misc_feature (21)..(21): 3'-3 attached terminal deoxyabasic moiety
cgggaggucucguagaccgnn

SEQ ID NO: 1679 - RNA, 21 nt, Artificial Sequence
  Description of Artificial Sequence: siNA sense
  misc_feature (1)..(1): 5'-3 attached terminal deoxyabasic moiety
  misc_feature (1)..(6): 2'-deoxy
  misc_feature (7)..(10): 2'-deoxy-2'-fluoro
  misc_feature (11)..(11): 2'-deoxy
  misc_feature (12)..(12): 2'-deoxy-2'-fluoro
  misc_feature (13)..(15): 2'-deoxy
  misc_feature (16)..(17): 2'-deoxy-2'-fluoro
  misc_feature (18)..(18): 2'-deoxy
  misc_feature (19)..(19): 2'-deoxy-2'-fluoro
  misc_feature (20)..(20): n is thymidine
  misc_feature (21)..(21): 3'-3 attached terminal deoxyabasic moiety
gggaggucucguagaccgunn

SEQ ID NO: 1680 - RNA, 21 nt, Artificial Sequence
  Description of Artificial Sequence: siNA antisense
  misc_feature (1)..(1): 2'-O-methyl
  misc_feature (2)..(4): 2'-deoxy-2'-fluoro
  misc_feature (5)..(5): 2'-O-methyl
  misc_feature (6)..(6): 2'-deoxy-2'-fluoro
  misc_feature (7)..(10): 2'-O-methyl
  misc_feature (10)..(16): 2'-deoxy-2'-fluoro
  misc_feature (17)..(19): 2'-O-methyl
  misc_feature (20)..(21): internucleotide phosphorothioate linkage
gucuacgagaccucccgggnn

SEQ ID NO: 1681 - RNA, 21 nt, Artificial Sequence
  Description of Artificial Sequence: siNA antisense
  misc_feature (1)..(2): 2'-O-methyl
  misc_feature (3)..(5): 2'-deoxy-2'-fluoro
  misc_feature (6)..(6): 2'-O-methyl
  misc_feature (7)..(7): 2'-deoxy-2'-fluoro
  misc_feature (8)..(11): 2'-O-methyl
  misc_feature (12)..(17): 2'-deoxy-2'-fluoro
  misc_feature (18)..(19): 2'-O-methyl
  misc_feature (20)..(21): internucleotide phosphorothioate linkage
ggucuacgagaccucccggnn

SEQ ID NO: 1682 - RNA, 21 nt, Artificial Sequence
  Description of Artificial Sequence: siNA antisense
  misc_feature (1)..(1): 2'-deoxy-2'-fluoro
  misc_feature (2)..(3): 2'-O-methyl
  misc_feature (4)..(6): 2'-deoxy-2'-fluoro
  misc_feature (7)..(7): 2'-O-methyl
  misc_feature (8)..(8): 2'-deoxy-2'-fluoro
  misc_feature (9)..(12): 2'-O-methyl
  misc_feature (13)..(18): 2'-deoxy-2'-fluoro
  misc_feature (19)..(19): 2'-O-methyl
  misc_feature (20)..(21): internucleotide phosphorothioate linkage
cggucuacgagaccucccgnn

SEQ ID NO: 1683 - RNA, 21 nt, Artificial Sequence
  Description of Artificial Sequence: siNA antisense
  misc_feature (1)..(1): 2'-O-methyl
  misc_feature (2)..(2): 2'-deoxy-2'-fluoro
  misc_feature (3)..(4): 2'-O-methyl
  misc_feature (5)..(7): 2'-deoxy-2'-fluoro
  misc_feature (8)..(8): 2'-O-methyl
  misc_feature (9)..(9): 2'-deoxy-2'-fluoro
  misc_feature (10)..(13): 2'-O-methyl
  misc_feature (14)..(19): 2'-deoxy-2'-fluoro
  misc_feature (20)..(21): internucleotide phosphorothioate linkage
acggucuacgagaccucccnn

SEQ ID NO: 1684 - RNA, 21 nt, Artificial Sequence
  Description of Artificial Sequence: siNA sense
  misc_feature (1)..(1): 5'-3 attached terminal deoxyabasic moiety
  misc_feature (1)..(1): 2'-deoxy-2'-fluoro
  misc_feature (2)..(4): 2'-deoxy
  misc_feature (5)..(5): 2'-deoxy-2'-fluoro
  misc_feature (6)..(6): 2'-deoxy
  misc_feature (7)..(10): 2'-deoxy-2'-fluoro
  misc_feature (11)..(16): 2'-deoxy
  misc_feature (17)..(19): 2'-deoxy-2'-fluoro
  misc_feature (20)..(20): n is thymidine
  misc_feature (21)..(21): 3'-3 attached terminal deoxyabasic moiety
cagaugcucuggagggcccnn

SEQ ID NO: 1685 - RNA, 21 nt, Artificial Sequence
  Description of Artificial Sequence: siNA sense
  misc_feature (1)..(1): 5'-3 attached terminal deoxyabasic moiety
  misc_feature (1)..(2): 2'-deoxy-2'-fluoro
  misc_feature (3)..(5): 2'-deoxy
  misc_feature (6)..(6): 2'-deoxy-2'-fluoro
  misc_feature (7)..(7): 2'-deoxy
  misc_feature (8)..(11): 2'-deoxy-2'-fluoro
  misc_feature (12)..(17): 2'-deoxy
  misc_feature (18)..(19): 2'-deoxy-2'-fluoro
  misc_feature (20)..(20): n is thymidine
  misc_feature (21)..(21): 3'-3 attached terminal deoxyabasic moiety
ccagaugcucuggagggccnn

SEQ ID NO: 1686 - RNA, 21 nt, Artificial Sequence
  Description of Artificial Sequence: siNA sense
  misc_feature (1)..(1): 5'-3 attached terminal deoxyabasic moiety
  misc_feature (1)..(1): 2'-deoxy
  misc_feature (2)..(3): 2'-deoxy-2'-fluoro
  misc_feature (4)..(6): 2'-deoxy
  misc_feature (7)..(7): 2'-deoxy-2'-fluoro
  misc_feature (8)..(8): 2'-deoxy
  misc_feature (9)..(12): 2'-deoxy-2'-fluoro
  misc_feature (13)..(18): 2'-deoxy
  misc_feature (19)..(19): 2'-deoxy-2'-fluoro
  misc_feature (20)..(20): n is thymidine
  misc_feature (21)..(21): 3'-3 attached terminal deoxyabasic moiety
gccagaugcucuggagggcnn

SEQ ID NO: 1687 - RNA, 21 nt, Artificial Sequence
  Description of Artificial Sequence: siNA sense
  misc_feature (1)..(1): 5'-3 attached terminal deoxyabasic moiety
  misc_feature (1)..(1): 2'-deoxy-2'-fluoro
  misc_feature (2)..(2): 2'-deoxy
  misc_feature (3)..(4): 2'-deoxy-2'-fluoro
  misc_feature (5)..(7): 2'-deoxy
  misc_feature (8)..(8): 2'-deoxy-2'-fluoro
  misc_feature (9)..(9): 2'-deoxy
  misc_feature (10)..(13): 2'-deoxy-2'-fluoro
  misc_feature (14)..(19): 2'-deoxy
  misc_feature (20)..(20): n is thymidine
  misc_feature (21)..(21): 3'-3 attached terminal deoxyabasic moiety
ugccagaugcucuggagggnn

SEQ ID NO: 1688 - RNA, 21 nt, Artificial Sequence
  Description of Artificial Sequence: siNA antisense
  misc_feature (1)..(3): 2'-O-methyl
  misc_feature (4)..(9): 2'-deoxy-2'-fluoro
  misc_feature (10)..(13): 2'-O-methyl
  misc_feature (14)..(14): 2'-deoxy-2'-fluoro
  misc_feature (15)..(15): 2'-O-methyl
  misc_feature (16)..(18): 2'-deoxy-2'-fluoro
  misc_feature (19)..(19): 2'-O-methyl
  misc_feature (20)..(21): internucleotide phosphorothioate linkage
gggcccuccagagcaucugnn

SEQ ID NO: 1689 - RNA, 21 nt, Artificial Sequence
  Description of Artificial Sequence: siNA antisense
  misc_feature (1)..(2): 2'-O-methyl
  misc_feature (3)..(8): 2'-deoxy-2'-fluoro
  misc_feature (9)..(12): 2'-O-methyl
  misc_feature (13)..(13): 2'-deoxy-2'-fluoro
  misc_feature (14)..(14): 2'-O-methyl
  misc_feature (15)..(17): 2'-deoxy-2'-fluoro
  misc_feature (18)..(19): 2'-O-methyl
  misc_feature (20)..(21): internucleotide phosphorothioate linkage
ggcccuccagagcaucuggnn

SEQ ID NO: 1690 - RNA, 21 nt, Artificial Sequence
  Description of Artificial Sequence: siNA antisense
  misc_feature (1)..(1): 2'-O-methyl
  misc_feature (2)..(7): 2'-deoxy-2'-fluoro
  misc_feature (8)..(11): 2'-O-methyl
  misc_feature (12)..(12): 2'-deoxy-2'-fluoro
  misc_feature (13)..(13): 2'-O-methyl
  misc_feature (14)..(16): 2'-deoxy-2'-fluoro
  misc_feature (17)..(18): 2'-O-methyl
  misc_feature (19)..(19): 2'-deoxy-2'-fluoro
  misc_feature (20)..(21): internucleotide phosphorothioate linkage
gcccuccagagcaucuggcnn

SEQ ID NO: 1691 - RNA, 21 nt, Artificial Sequence
  Description of Artificial Sequence: siNA antisense
  misc_feature (1)..(6): 2'-deoxy-2'-fluoro
  misc_feature (7)..(10): 2'-O-methyl
  misc_feature (11)..(11): 2'-deoxy-2'-fluoro
  misc_feature (12)..(12): 2'-O-methyl
  misc_feature (13)..(15): 2'-deoxy-2'-fluoro
  misc_feature (16)..(17): 2'-O-methyl
  misc_feature (18)..(18): 2'-deoxy-2'-fluoro
  misc_feature (19)..(19): 2'-O-methyl
  misc_feature (20)..(21): internucleotide phosphorothioate linkage
cccuccagagcaucuggcann

SEQ ID NO: 1692 - RNA, 21 nt, Artificial Sequence
  Description of Artificial Sequence: siNA sense
  misc_feature (1)..(3): 2'-deoxy-2'-fluoro
  misc_feature (4)..(4): 2'-O-methyl
  misc_feature (5)..(5): 2'-deoxy-2'-fluoro
  misc_feature (6)..(7): 2'-O-methyl
  misc_feature (8)..(8): 2'-deoxy-2'-fluoro
  misc_feature (9)..(9): 2'-O-methyl
  misc_feature (10)..(11): 2'-deoxy-2'-fluoro
  misc_feature (12)..(12): 2'-O-methyl
  misc_feature (13)..(15): 2'-deoxy-2'-fluoro
  misc_feature (16)..(17): 2'-O-methyl
  misc_feature (18)..(18): 2'-deoxy-2'-fluoro
  misc_feature (19)..(19): 2'-O-methyl
  misc_feature (20)..(21): internucleotide phosphorothioate linkage
cuugugguacugccugauann

SEQ ID NO: 1693 - RNA, 21 nt, Artificial Sequence
  Description of Artificial Sequence: siNA sense
  misc_feature (1)..(1): 2'-deoxy-2'-fluoro
  misc_feature (2)..(3): 2'-O-methyl
  misc_feature (4)..(4): 2'-deoxy-2'-fluoro
  misc_feature (5)..(5): 2'-O-methyl
  misc_feature (6)..(7): 2'-deoxy-2'-fluoro
  misc_feature (8)..(8): 2'-O-methyl
  misc_feature (9)..(11): 2'-deoxy-2'-fluoro
  misc_feature (12)..(13): 2'-O-methyl
  misc_feature (14)..(14): 2'-deoxy-2'-fluoro
  misc_feature (15)..(18): 2'-O-methyl
  misc_feature (19)..(19): 2'-deoxy-2'-fluoro
  misc_feature (20)..(21): internucleotide phosphorothioate linkage
ugguacugccugauagggunn

SEQ ID NO: 1694 - RNA, 21 nt, Artificial Sequence
  Description of Artificial Sequence: siNA sense
  misc_feature (1)..(4): 2'-deoxy-2'-fluoro
  misc_feature (5)..(10): 2'-O-methyl
  misc_feature (11)..(14): 2'-deoxy-2'-fluoro
  misc_feature (15)..(15): 2'-O-methyl
  misc_feature (16)..(16): 2'-deoxy-2'-fluoro
  misc_feature (17)..(19): 2'-O-methyl
  misc_feature (20)..(21): internucleotide phosphorothioate linkage
ccccgggaggucucguagann

SEQ ID NO: 1695 - RNA, 21 nt, Artificial Sequence
  Description of Artificial Sequence: siNA sense
  misc_feature (1)..(1): 2'-O-methyl
  misc_feature (2)..(2): 2'-deoxy-2'-fluoro
  misc_feature (3)..(4): 2'-O-methyl
  misc_feature (5)..(7): 2'-deoxy-2'-fluoro
  misc_feature (8)..(8): 2'-O-methyl
  misc_feature (9)..(10): 2'-deoxy-2'-fluoro
  misc_feature (11)..(11): 2'-O-methyl
  misc_feature (12)..(12): 2'-deoxy-2'-fluoro
  misc_feature (13)..(14): 2'-O-methyl
  misc_feature (15)..(15): 2'-deoxy-2'-fluoro
  misc_feature (16)..(16): 2'-O-methyl
  misc_feature (17)..(19): 2'-deoxy-2'-fluoro
  misc_feature (20)..(21): internucleotide phosphorothioate linkage
auaguccgucaugguguucnn

SEQ ID NO: 1696 - RNA, 21 nt, Artificial Sequence
  Description of Artificial Sequence: siNA sense
  misc_feature (1)..(1): 2'-deoxy-2'-fluoro
  misc_feature (2)..(5): 2'-O-methyl
  misc_feature (6)..(6): 2'-deoxy-2'-fluoro
  misc_feature (7)..(8): 2'-O-methyl
  misc_feature (9)..(11): 2'-deoxy-2'-fluoro
  misc_feature (12)..(12): 2'-O-methyl
  misc_feature (13)..(14): 2'-deoxy-2'-fluoro
  misc_feature (15)..(15): 2'-O-methyl
  misc_feature (16)..(16): 2'-deoxy-2'-fluoro
  misc_feature (17)..(18): 2'-O-methyl
  misc_feature (19)..(19): 2'-deoxy-2'-fluoro
  misc_feature (20)..(21): internucleotide phosphorothioate linkage
ugggauaguccgucauggunn

SEQ ID NO: 1697 - RNA, 21 nt, Artificial Sequence
  Description of Artificial Sequence: siNA sense
  misc_feature (1)..(3): 2'-O-methyl
  misc_feature (4)..(4): 2'-deoxy-2'-fluoro
  misc_feature (5)..(5): 2'-O-methyl
  misc_feature (6)..(9): 2'-deoxy-2'-fluoro
  misc_feature (10)..(15): 2'-O-methyl
  misc_feature (16)..(19): 2'-deoxy-2'-fluoro
  misc_feature (20)..(21): internucleotide phosphorothioate linkage
agaugcucuggagggccccnn

SEQ ID NO: 1698 - RNA, 21 nt, Artificial Sequence
  Description of Artificial Sequence: siNA sense
  misc_feature (1)..(2): 2'-deoxy-2'-fluoro
  misc_feature (3)..(8): 2'-O-methyl
  misc_feature (9)..(12): 2'-deoxy-2'-fluoro
  misc_feature (13)..(13): 2'-O-methyl
  misc_feature (14)..(14): 2'-deoxy-2'-fluoro
  misc_feature (15)..(17): 2'-O-methyl
  misc_feature (18)..(19): 2'-deoxy-2'-fluoro
  misc_feature (20)..(21): internucleotide phosphorothioate linkage
ccgggaggucucguagaccnn

SEQ ID NO: 1699 - RNA, 21 nt, Artificial Sequence
  Description of Artificial Sequence: siNA sense
  misc_feature (1)..(2): 2'-deoxy-2'-fluoro
  misc_feature (3)..(5): 2'-O-methyl
  misc_feature (6)..(6): 2'-deoxy-2'-fluoro
  misc_feature (7)..(7): 2'-O-methyl
  misc_feature (8)..(11): 2'-deoxy-2'-fluoro
  misc_feature (12)..(17): 2'-O-methyl
  misc_feature (18)..(19): 2'-deoxy-2'-fluoro
  misc_feature (20)..(21): internucleotide phosphorothioate linkage
ccagaugcucuggagggccnn

SEQ ID NO: 1700 - RNA, 21 nt, Artificial Sequence
  Description of Artificial Sequence: siNA sense
  misc_feature (1)..(1): 2'-deoxy-2'-fluoro
  misc_feature (2)..(7): 2'-O-methyl
  misc_feature (8)..(11): 2'-deoxy-2'-fluoro
  misc_feature (12)..(12): 2'-O-methyl
  misc_feature (13)..(13): 2'-deoxy-2'-fluoro
  misc_feature (14)..(16): 2'-O-methyl
  misc_feature (17)..(18): 2'-deoxy-2'-fluoro
  misc_feature (19)..(19): 2'-O-methyl
  misc_feature (20)..(21): internucleotide phosphorothioate linkage
cgggaggucucguagaccgnn

SEQ ID NO: 1701 - RNA, 21 nt, Artificial Sequence
  Description of Artificial Sequence: siNA sense
  misc_feature (1)..(1): 2'-O-methyl
  misc_feature (2)..(3): 2'-deoxy-2'-fluoro
  misc_feature (4)..(6): 2'-O-methyl
  misc_feature (7)..(7): 2'-deoxy-2'-fluoro
  misc_feature (8)..(8): 2'-O-methyl
  misc_feature (9)..(12): 2'-deoxy-2'-fluoro
  misc_feature (13)..(18): 2'-O-methyl
  misc_feature (19)..(19): 2'-deoxy-2'-fluoro
  misc_feature (20)..(21): internucleotide phosphorothioate linkage
gccagaugcucuggagggcnn

SEQ ID NO: 1702 - RNA, 21 nt, Artificial Sequence
  Description of Artificial Sequence: siNA sense
  misc_feature (1)..(1): 5'-3 attached terminal deoxyabasic moiety
  misc_feature (1)..(2): 2'-deoxy-2'-fluoro
  misc_feature (3)..(8): 2'-O-methyl
  misc_feature (9)..(12): 2'-deoxy-2'-fluoro
  misc_feature (13)..(13): 2'-O-methyl
  misc_feature (14)..(14): 2'-deoxy-2'-fluoro
  misc_feature (15)..(17): 2'-O-methyl
  misc_feature (18)..(19): 2'-deoxy-2'-fluoro
  misc_feature (20)..(21): internucleotide phosphorothioate linkage
ccgggaggucucguagaccnn

SEQ ID NO: 1703 - RNA, 21 nt, Artificial Sequence
  Description of Artificial Sequence: siNA sense
  misc_feature (1)..(2): 2'-deoxy-2'-fluoro
  misc_feature (3)..(8): 2'-O-methyl
  misc_feature (9)..(12): 2'-deoxy-2'-fluoro
  misc_feature (13)..(13): 2'-O-methyl
  misc_feature (14)..(14): 2'-deoxy-2'-fluoro
  misc_feature (15)..(17): 2'-O-methyl
  misc_feature (18)..(19): 2'-deoxy-2'-fluoro
  misc_feature (20)..(21): internucleotide phosphorothioate linkage
  misc_feature (21)..(21): 3'-3 attached terminal deoxyabasic moiety
ccgggaggucucguagaccnn

SEQ ID NO: 1704 - RNA, 21 nt, Artificial Sequence
  Description of Artificial Sequence: siNA sense
  misc_feature (1)..(1): 5'-3 attached terminal deoxyabasic moiety
  misc_feature (1)..(2): 2'-deoxy-2'-fluoro
  misc_feature (3)..(8): 2'-O-methyl
  misc_feature (9)..(12): 2'-deoxy-2'-fluoro
  misc_feature (13)..(13): 2'-O-methyl
  misc_feature (14)..(14): 2'-deoxy-2'-fluoro
  misc_feature (15)..(17): 2'-O-methyl
  misc_feature (18)..(19): 2'-deoxy-2'-fluoro
  misc_feature (20)..(21): internucleotide phosphorothioate linkage
  misc_feature (21)..(21): 3'-3 attached terminal deoxyabasic moiety
ccgggaggucucguagaccnn

SEQ ID NO: 1705 - RNA, 34 nt, Artificial Sequence
  Description of Artificial Sequence: siNA 3?-classI
  misc_feature (33)..(34): n is thymidine
ucucguagaccuuggucuacgagaccucccggnn

SEQ ID NO: 1706 - RNA, 32 nt, Artificial Sequence
  Description of Artificial Sequence: siNA 3?-classI
  misc_feature (31)..(32): n is thymidine
ucguagaccuuggucuacgagaccucccggnn

SEQ ID NO: 1707 - RNA, 30 nt, Artificial Sequence
  Description of Artificial Sequence: siNA 3?-classI
  misc_feature (29)..(30): n is thymidine
guagaccuuggucuacgagaccucccggnn

SEQ ID NO: 1708 - RNA, 28 nt, Artificial Sequence
  Description of Artificial Sequence: siNA 3?-classI
  misc_feature (27)..(28): n is thymidine
agaccuuggucuacgagaccucccggnn

SEQ ID NO: 1709 - RNA, 32 nt, Artificial Sequence
  Description of Artificial Sequence: siNA 5?-classI
ggucuacgagaccucccgguuccgggaggucu

SEQ ID NO: 1710 - RNA, 30 nt, Artificial Sequence
  Description of Artificial Sequence: siNA 5?-classI
ggucuacgagaccucccgguuccgggaggu

SEQ ID NO: 1711 - RNA, 28 nt, Artificial Sequence
  Description of Artificial Sequence: siNA 5?-classI
ggucuacgagaccucccgguuccgggag

SEQ ID NO: 1712 - RNA, 26 nt, Artificial Sequence
  Description of Artificial Sequence: siNA 5?-classI
ggucuacgagaccucccgguuccggg

SEQ ID NO: 1713 - RNA, 35 nt, Artificial Sequence
  Description of Artificial Sequence: siNA 3?-classI
  misc_feature (34)..(35): n is thymidine
cucguagaccgaaaggucuacgagaccucccggnn

SEQ ID NO: 1714 - RNA, 33 nt, Artificial Sequence
  Description of Artificial Sequence: siNA 3?-gaaa
  misc_feature (32)..(33): n is thymidine
cguagaccgaaaggucuacgagaccucccggnn

SEQ ID NO: 1715 - RNA, 31 nt, Artificial Sequence
  Description of Artificial Sequence: siNA 3?-gaaa
  misc_feature (30)..(31): n is thymidine
uagaccgaaaggucuacgagaccucccggnn

SEQ ID NO: 1716 - RNA, 29 nt, Artificial Sequence
  Description of Artificial Sequence: siNA 3?-gaaa
  misc_feature (28)..(29): n is thymidine
gaccgaaaggucuacgagaccucccggnn

SEQ ID NO: 1717 - RNA, 35 nt, Artificial Sequence
  Description of Artificial Sequence: siNA 5?-gaaa
ggucuacgagaccucccgguugaaaccgggagguc

SEQ ID NO: 1718 - RNA, 33 nt, Artificial Sequence
  Description of Artificial Sequence: siNA 5?-gaaa
ggucuacgagaccucccgguugaaaccgggagg

SEQ ID NO: 1719 - RNA, 31 nt, Artificial Sequence
  Description of Artificial Sequence: siNA 5?-gaaa
ggucuacgagaccucccgguugaaaccggga

SEQ ID NO: 1720 - RNA, 29 nt, Artificial Sequence
  Description of Artificial Sequence: siNA 5?-gaaa
ggucuacgagaccucccgguugaaaccgg

SEQ ID NO: 1721 - RNA, 40 nt, Artificial Sequence
  Description of Artificial Sequence: siNA 3?-uuuguguag
  misc_feature (39)..(40): n is thymidine
cguagaccuuuuuguguagggucuacgagaccucccggnn

SEQ ID NO: 1722 - RNA, 38 nt, Artificial Sequence
  Description of Artificial Sequence: siNA 3?-uuuguguag
  misc_feature (37)..(38): n is thymidine
uagaccuuuuuguguagggucuacgagaccucccggnn

SEQ ID NO: 1723 - RNA, 36 nt, Artificial Sequence
  Description of Artificial Sequence: siNA 3?-uuuguguag
  misc_feature (35)..(36): n is thymidine
gaccuuuuuguguagggucuacgagaccucccggnn

SEQ ID NO: 1724 - RNA, 34 nt, Artificial Sequence
  Description of Artificial Sequence: siNA 3?-uuuguguag
  misc_feature (33)..(34): n is thymidine
ccuuuuuguguagggucuacgagaccucccggnn

SEQ ID NO: 1725 - RNA, 40 nt, Artificial Sequence
  Description of Artificial Sequence: siNA 5?-uuuguguag
ggucuacgagaccucccgguuuuuguguagccgggagguc

SEQ ID NO: 1726 - RNA, 38 nt, Artificial Sequence
  Description of Artificial Sequence: siNA 5?-uuuguguag
ggucuacgagaccucccgguuuuuguguagccgggagg

SEQ ID NO: 1727 - RNA, 36 nt, Artificial Sequence
  Description of Artificial Sequence: siNA 5?-uuuguguag
ggucuacgagaccucccgguuuuuguguagccggga

SEQ ID NO: 1728 - RNA, 34 nt, Artificial Sequence
  Description of Artificial Sequence: siNA 5?-uuuguguag
ggucuacgagaccucccgguuuuuguguagccgg

SEQ ID NO: 1729 - RNA, 21 nt, Artificial Sequence
  Description of Artificial Sequence: siNA antisense
  misc_feature (3)..(5): 2'-deoxy-2'-fluoro
  misc_feature (7)..(7): 2'-deoxy-2'-fluoro
  misc_feature (12)..(17): 2'-deoxy-2'-fluoro
  misc_feature (20)..(21): internucleotide phosphorothioate linkage
ggucuacgagaccucccggnn

SEQ ID NO: 1730 - RNA, 21 nt, Artificial Sequence
  Description of Artificial Sequence: siNA antisense
  misc_feature (1)..(1): terminal phosphate group
  misc_feature (3)..(5): 2'-deoxy-2'-fluoro
  misc_feature (7)..(7): 2'-deoxy-2'-fluoro
  misc_feature (12)..(17): 2'-deoxy-2'-fluoro
  misc_feature (20)..(21): internucleotide phosphorothioate linkage
ggucuacgagaccucccggnn

SEQ ID NO: 1731 - RNA, 21 nt, Artificial Sequence
  Description of Artificial Sequence: siNA antisense
  misc_feature (1)..(1): terminal phosphorothioate linkage
  misc_feature (3)..(5): 2'-deoxy-2'-fluoro
  misc_feature (7)..(7): 2'-deoxy-2'-fluoro
  misc_feature (12)..(17): 2'-deoxy-2'-fluoro
  misc_feature (20)..(21): internucleotide phosphorothioate linkage
ggucuacgagaccucccggnn

SEQ ID NO: 1732 - RNA, 21 nt, Artificial Sequence
  Description of Artificial Sequence: siNA antisense
  misc_feature (20)..(21): n is thymidine
ggucuacgagaccucccggnn

SEQ ID NO: 1733 - RNA, 21 nt, Artificial Sequence
  Description of Artificial Sequence: siNA antisense
  misc_feature (1)..(1): terminal phosphate group
  misc_feature (20)..(21): n is thymidine
ggucuacgagaccucccggnn

SEQ ID NO: 1734 - RNA, 21 nt, Artificial Sequence
  Description of Artificial Sequence: siNA antisense
  misc_feature (1)..(1): terminal phosphorothioate group
  misc_feature (20)..(21): n is thymidine
ggucuacgagaccucccggnn

SEQ ID NO: 1735 - RNA, 23 nt, Artificial Sequence
  Description of Artificial Sequence: siNA antisense
  misc_feature (1)..(1): terminal phosphate group
  misc_feature (22)..(23): n is thymidine
ggucuacgagaccucccggggnn

SEQ ID NO: 1736 - RNA, 27 nt, Artificial Sequence
  Description of Artificial Sequence: siNA antisense
  misc_feature (1)..(1): terminal phosphate group
  misc_feature (27)..(27): 3'-3 attached terminal deoxyabasic moiety
  misc_feature (27)..(27): 2'-deoxy-2'-fluoro
ggucuacgagaccucccggucucguau

SEQ ID NO: 1737 - RNA, 31 nt, Artificial Sequence
  Description of Artificial Sequence: siNA antisense
  misc_feature (1)..(1): terminal phosphate group
  misc_feature (30)..(31): 2'-deoxy-2'-fluoro
  misc_feature (31)..(31): 3'-3 attached terminal deoxyabasic moiety
ggucuacgagaccucccggaggucucguauu

SEQ ID NO: 1738 - RNA, 30 nt, Artificial Sequence
  Description of Artificial Sequence: siNA antisense
  misc_feature (1)..(1): terminal phosphate group
  misc_feature (21)..(22): n is thymidine
  misc_feature (30)..(30): 3'-3 attached terminal deoxyabasic moiety
  misc_feature (30)..(30): 2'-deoxy-2'-fluoro
mggucuacgagaccucccggnnucucguau

SEQ ID NO: 1739 - RNA, 32 nt, Artificial Sequence
  Description of Artificial Sequence: siNA antisense
  misc_feature (1)..(1): terminal phosphate group
  misc_feature (20)..(21): n is thymidine
  misc_feature (32)..(32): 3'-3 attached terminal deoxyabasic moiety
  misc_feature (32)..(32): 2'-deoxy-2'-fluoro
ggucuacgagaccucccggnnaggucucguau

SEQ ID NO: 1740 - RNA, 21 nt, Artificial Sequence
  Description of Artificial Sequence: siNA sense
  misc_feature (1)..(1): 5'-3 attached terminal deoxyabasic moiety
  misc_feature (1)..(2): 2'-deoxy-2'-fluoro
  misc_feature (9)..(12): 2'-deoxy-2'-fluoro
  misc_feature (14)..(14): 2'-deoxy-2'-fluoro
  misc_feature (18)..(19): 2'-deoxy-2'-fluoro
  misc_feature (20)..(20): n is thymidine
  misc_feature (21)..(21): 3'-3 attached terminal deoxyabasic moiety
ccgggaggucucguagaccnn

SEQ ID NO: 1741 - RNA, 21 nt, Artificial Sequence
  Description of Artificial Sequence: siNA sense
  misc_feature (1)..(1): 5'-3 attached terminal deoxyabasic moiety
  misc_feature (20)..(20): n is thymidine
  misc_feature (21)..(21): 3'-3 attached terminal deoxyabasic moiety
ccccgggaggucucguagann

SEQ ID NO: 1742 - RNA, 21 nt, Artificial Sequence
  Description of Artificial Sequence: siNA sense
  misc_feature (1)..(1): 5'-3 attached terminal deoxyabasic moiety
  misc_feature (20)..(20): n is thymidine
  misc_feature (21)..(21): 5'-3 attached terminal deoxyabasic moiety
cccgggaggucucguagacnn

SEQ ID NO: 1743 - RNA, 21 nt, Artificial Sequence
  Description of Artificial Sequence: siNA sense
  misc_feature (1)..(1): 5'-3 attached terminal deoxyabasic moiety
  misc_feature (20)..(20): n is thymidine
  misc_feature (21)..(21): 3'-3 attached terminal deoxyabasic moiety
ccgggaggucucguagaccnn

SEQ ID NO: 1744 - RNA, 21 nt, Artificial Sequence
  Description of Artificial Sequence: siNA sense
  misc_feature (1)..(1): 5'-3 attached terminal deoxyabasic moiety
  misc_feature (20)..(20): n is thymidine
  misc_feature (21)..(21): 3'-3 attached terminal deoxyabasic moiety
cgggaggucucguagaccgnn

SEQ ID NO: 1745 - RNA, 21 nt, Artificial Sequence
  Description of Artificial Sequence: siNA sense
  misc_feature (1)..(1): 5'-3 attached terminal deoxyabasic moiety
  misc_feature (20)..(20): n is thymidine
  misc_feature (21)..(21): 3'-3 attached terminal deoxyabasic moiety
gggaggucucguagaccgunn

SEQ ID NO: 1746 - RNA, 21 nt, Artificial Sequence
  Description of Artificial Sequence: siNA antisense
  misc_feature (20)..(21): internucleotide phosphorothioate linkage
ucuacgagaccucccggggnn

SEQ ID NO: 1747 - RNA, 21 nt, Artificial Sequence
  Description of Artificial Sequence: siNA antisense
  misc_feature (20)..(21): internucleotide phosphorothioate linkage
gucuacgagaccucccgggnn

SEQ ID NO: 1748 - RNA, 21 nt, Artificial Sequence
  Description of Artificial Sequence: siNA antisense
  misc_feature (20)..(21): internucleotide phosphorothioate linkage
ggucuacgagaccucccggnn

SEQ ID NO: 1749 - RNA, 21 nt, Artificial Sequence
  Description of Artificial Sequence: siNA antisense
  misc_feature (20)..(21): internucleotide phosphorothioate linkage
cggucuacgagaccucccgnn

SEQ ID NO: 1750 - RNA, 21 nt, Artificial Sequence
  Description of Artificial Sequence: siNA antisense
  misc_feature (20)..(21): internucleotide phosphorothioate linkage
acggucuacgagaccucccnn

SEQ ID NO: 1751 - RNA, 21 nt, Artificial Sequence
  Description of Artificial Sequence: siNA sense
  misc_feature (1)..(1): 5'-3 attached terminal deoxyabasic moiety
  misc_feature (1)..(2): 2'-deoxy-2'-fluoro
  misc_feature (6)..(6): 2'-deoxy-2'-fluoro
  misc_feature (8)..(11): 2'-deoxy-2'-fluoro
  misc_feature (18)..(19): 2'-deoxy-2'-fluoro
  misc_feature (20)..(20): n is thymidine
  misc_feature (21)..(21): 3'-3 attached terminal deoxyabasic moiety
ccagaugcucuggagggccnn

SEQ ID NO: 1752 - RNA, 21 nt, Artificial Sequence
  Description of Artificial Sequence: siNA antisense
  misc_feature (3)..(8): 2'-deoxy-2'-fluoro
  misc_feature (13)..(13): 2'-deoxy-2'-fluoro
  misc_feature (15)..(17): 2'-deoxy-2'-fluoro
  misc_feature (20)..(21): internucleotide phosphorothioate linkage
ggcccuccagagcaucuggnn

SEQ ID NO: 1753 - RNA, 21 nt, Artificial Sequence
  Description of Artificial Sequence: siNA sense
  misc_feature (1)..(1): 5'-3 attached terminal deoxyabasic moiety
  misc_feature (20)..(20): n is thymidine
  misc_feature (21)..(21): 3'-3 attached terminal deoxyabasic moiety
agaugcucuggagggccccnn

SEQ ID NO: 1754 - RNA, 21 nt, Artificial Sequence
  Description of Artificial Sequence: siNA sense
  misc_feature (1)..(1): 5'-3 attached terminal deoxyabasic moiety
  misc_feature (20)..(20): n is thymidine
  misc_feature (21)..(21): 3'-3 attached terminal deoxyabasic moiety
cagaugcucuggagggcccnn

SEQ ID NO: 1755 - RNA, 21 nt, Artificial Sequence
  Description of Artificial Sequence: siNA sense
  misc_feature (1)..(1): 5'-3 attached terminal deoxyabasic moiety
  misc_feature (20)..(20): n is thymidine
  misc_feature (21)..(21): 3'-3 attached terminal deoxyabasic moiety
ccagaugcucuggagggccnn

SEQ ID NO: 1756 - RNA, 21 nt, Artificial Sequence
  Description of Artificial Sequence: siNA sense
  misc_feature (1)..(1): 5'-3 attached terminal deoxyabasic moiety
  misc_feature (20)..(20): n is thymidine
  misc_feature (21)..(21): 3'-3 attached terminal deoxyabasic moiety
gccagaugcucuggagggcnn

SEQ ID NO: 1757 - RNA, 21 nt, Artificial Sequence
  Description of Artificial Sequence: siNA sense
  misc_feature (1)..(1): 5'-3 attached terminal deoxyabasic moiety
  misc_feature (20)..(20): n is thymidine
  misc_feature (21)..(21): 3'-3 attached terminal deoxyabasic moiety
ugccagaugcucuggagggnn

SEQ ID NO: 1758 - RNA, 21 nt, Artificial Sequence
  Description of Artificial Sequence: siNA antisense
  misc_feature (20)..(21): internucleotide phosphorothioate linkage
ggggcccuccagagcaucunn

SEQ ID NO: 1759 - RNA, 21 nt, Artificial Sequence
  Description of Artificial Sequence: siNA antisense
  misc_feature (20)..(21): internucleotide phosphorothioate linkage
gggcccuccagagcaucugnn

SEQ ID NO: 1760 - RNA, 21 nt, Artificial Sequence
  Description of Artificial Sequence: siNA antisense
  misc_feature (20)..(21): internucleotide phosphorothioate linkage
ggcccuccagagcaucuggnn

SEQ ID NO: 1761 - RNA, 21 nt, Artificial Sequence
  Description of Artificial Sequence: siNA antisense
  misc_feature (20)..(21): internucleotide phosphorothioate linkage
gcccuccagagcaucuggcnn

SEQ ID NO: 1762 - RNA, 21 nt, Artificial Sequence
  Description of Artificial Sequence: siNA antisense
  misc_feature (20)..(21): internucleotide phosphorothioate linkage
cccuccagagcaucuggcann

SEQ ID NO: 1763 - RNA, 31 nt, Artificial Sequence
  Description of Artificial Sequence: siNA antisense
  misc_feature (1)..(1): terminal phosphate group
  misc_feature (31)..(31): 3'-3 attached terminal deoxyabasic moiety
acccuaucaggcaguaccaguacugccugau

SEQ ID NO: 1764 - RNA, 31 nt, Artificial Sequence
  Description of Artificial Sequence: siNA antisense
  misc_feature (1)..(1): terminal phosphate group
  misc_feature (31)..(31): 3'-3 attached terminal deoxyabasic moiety
acccuaucaggcaguaccgguacugccugau

SEQ ID NO: 1765 - RNA, 31 nt, Artificial Sequence
  Description of Artificial Sequence: siNA antisense
  misc_feature (1)..(1): terminal phosphate group
  misc_feature (31)..(31): 3'-3 attached terminal deoxyabasic moiety
ggucuacgagaccucccggaggucucguaga

SEQ ID NO: 1766 - RNA, 28 nt, Artificial Sequence
  Description of Artificial Sequence: siNA antisense
  misc_feature (1)..(1): terminal phosphate group
  misc_feature (28)..(28): 3'-3 attached terminal deoxyabasic moiety
ggucuacgagaccuccggaggucucgua

SEQ ID NO: 1767 - RNA, 21 nt, Artificial Sequence
  Description of Artificial Sequence: siNA antisense
  misc_feature (1)..(1): 2'-deoxy-2'-fluoro
  misc_feature (2)..(2): 2'-O-methyl
  misc_feature (3)..(4): 2'-deoxy-2'-fluoro
  misc_feature (5)..(5): 2'-O-methyl
  misc_feature (6)..(6): 2'-deoxy-2'-fluoro
  misc_feature (7)..(7): 2'-O-methyl
  misc_feature (8)..(14): 2'-deoxy-2'-fluoro
  misc_feature (15)..(15): 2'-O-methyl
  misc_feature (16)..(17): 2'-deoxy-2'-fluoro
  misc_feature (18)..(18): 2'-O-methyl
  misc_feature (19)..(19): 2'-deoxy-2'-fluoro
  misc_feature (20)..(21): internucleotide phosphorothioate linkage
uaucaggcaguaccacaagnn

SEQ ID NO: 1768 - RNA, 21 nt, Artificial Sequence
  Description of Artificial Sequence: siNA antisense
  misc_feature (1)..(15): 2'-deoxy-2'-fluoro
  misc_feature (16)..(16): 2'-O-methyl
  misc_feature (17)..(19): 2'-deoxy-2'-fluoro
  misc_feature (20)..(21): internucleotide phosphorothioate linkage
acccuaucaggcaguaccann

SEQ ID NO: 1769 - RNA, 21 nt, Artificial Sequence
  Description of Artificial Sequence: siNA antisense
  misc_feature (1)..(6): 2'-deoxy-2'-fluoro
  misc_feature (7)..(7): 2'-O-methyl
  misc_feature (8)..(13): 2'-deoxy-2'-fluoro
  misc_feature (14)..(14): 2'-O-methyl
  misc_feature (15)..(19): 2'-deoxy-2'-fluoro
  misc_feature (20)..(21): internucleotide phosphorothioate linkage
ucgcaagcacccuaucaggnn

SEQ ID NO: 1770 - RNA, 21 nt, Artificial Sequence
  Description of Artificial Sequence: siNA antisense
  misc_feature (1)..(7): 2'-deoxy-2'-fluoro
  misc_feature (8)..(8): 2'-O-methyl
  misc_feature (9)..(19): 2'-deoxy-2'-fluoro
  misc_feature (20)..(21): internucleotide phosphorothioate linkage
cacucgcaagcacccuaucnn

SEQ ID NO: 1771 - RNA, 21 nt, Artificial Sequence
  Description of Artificial Sequence: siNA antisense
  misc_feature (1)..(1): 2'-deoxy-2'-fluoro
  misc_feature (2)..(2): 2'-O-methyl
  misc_feature (3)..(7): 2'-deoxy-2'-fluoro
  misc_feature (8)..(8): 2'-O-methyl
  misc_feature (9)..(19): 2'-deoxy-2'-fluoro
  misc_feature (20)..(21): internucleotide phosphorothioate linkage
cacucgcaagcacccuaucnn

SEQ ID NO: 1772 - RNA, 21 nt, Artificial Sequence
  Description of Artificial Sequence: siNA sense
  misc_feature (1)..(1): 5'-3 attached terminal deoxyabasic moiety
  misc_feature (1)..(2): 2'-deoxy-2'-fluoro
  misc_feature (3)..(9): 2'-deoxy
  misc_feature (10)..(11): 2'-deoxy-2'-fluoro
  misc_feature (12)..(12): 2'-deoxy
  misc_feature (13)..(13): 2'-deoxy-2'-fluoro
  misc_feature (14)..(15): 2'-deoxy
  misc_feature (16)..(16): 2'-deoxy-2'-fluoro
  misc_feature (17)..(18): 2'-deoxy
  misc_feature (19)..(19): 2'-deoxy-2'-fluoro
  misc_feature (20)..(20): n is thymidine
  misc_feature (21)..(21): 3'-3 attached terminal deoxyabasic moiety
ccgggagagccauaguggunn

SEQ ID NO: 1773 - RNA, 21 nt, Artificial Sequence
  Description of Artificial Sequence: siNA sense
  misc_feature (1)..(1): 5'-3 attached terminal deoxyabasic moiety
  misc_feature (1)..(1): 2'-deoxy-2'-fluoro
  misc_feature (2)..(8): 2'-deoxy
  misc_feature (9)..(10): 2'-deoxy-2'-fluoro
  misc_feature (11)..(11): 2'-deoxy
  misc_feature (12)..(12): 2'-deoxy-2'-fluoro
  misc_feature (13)..(14): 2'-deoxy
  misc_feature (15)..(15): 2'-deoxy-2'-fluoro
  misc_feature (16)..(17): 2'-deoxy
  misc_feature (18)..(19): 2'-deoxy-2'-fluoro
  misc_feature (20)..(20): n is thymidine
  misc_feature (21)..(21): 3'-3 attached terminal deoxyabasic moiety
cgggagagccauaguggucnn

SEQ ID NO: 1774 - RNA, 21 nt, Artificial Sequence
  Description of Artificial Sequence: siNA sense
  misc_feature (1)..(1): 5'-3 attached terminal deoxyabasic moiety
  misc_feature (1)..(7): 2'-deoxy
  misc_feature (8)..(9): 2'-deoxy-2'-fluoro
  misc_feature (10)..(10): 2'-deoxy
  misc_feature (11)..(11): 2'-deoxy-2'-fluoro
  misc_feature (12)..(13): 2'-deoxy
  misc_feature (14)..(14): 2'-deoxy-2'-fluoro
  misc_feature (15)..(16): 2'-deoxy
  misc_feature (17)..(19): 2'-deoxy-2'-fluoro
  misc_feature (20)..(20): n is thymidine
  misc_feature (21)..(21): 3'-3 attached terminal deoxyabasic moiety
gggagagccauaguggucunn

SEQ ID NO: 1775 - RNA, 21 nt, Artificial Sequence
  Description of Artificial Sequence: siNA sense
  misc_feature (1)..(1): 5'-3 attached terminal deoxyabasic moiety
  misc_feature (1)..(1): 2'-deoxy
  misc_feature (2)..(2): 2'-deoxy-2'-fluoro
  misc_feature (3)..(4): 2'-deoxy
  misc_feature (5)..(7): 2'-deoxy-2'-fluoro
  misc_feature (8)..(8): 2'-deoxy
  misc_feature (9)..(9): 2'-deoxy-2'-fluoro
  misc_feature (10)..(13): 2'-deoxy
  misc_feature (14)..(15): 2'-deoxy-2'-fluoro
  misc_feature (16)..(17): 2'-deoxy
  misc_feature (18)..(18): 2'-deoxy-2'-fluoro
  misc_feature (19)..(19): 2'-deoxy
  misc_feature (20)..(20): n is thymidine
  misc_feature (21)..(21): 3'-3 attached terminal deoxyabasic moiety
guggucugcggaaccggugnn

SEQ ID NO: 1776 - RNA, 21 nt, Artificial Sequence
  Description of Artificial Sequence: siNA sense
  misc_feature (1)..(1): 5'-3 attached terminal deoxyabasic moiety
  misc_feature (1)..(1): 2'-deoxy-2'-fluoro
  misc_feature (2)..(3): 2'-deoxy
  misc_feature (4)..(6): 2'-deoxy-2'-fluoro
  misc_feature (7)..(7): 2'-deoxy
  misc_feature (8)..(8): 2'-deoxy-2'-fluoro
  misc_feature (9)..(12): 2'-deoxy
  misc_feature (13)..(14): 2'-deoxy-2'-fluoro
  misc_feature (15)..(16): 2'-deoxy
  misc_feature (17)..(17): 2'-deoxy-2'-fluoro
  misc_feature (18)..(19): 2'-deoxy
  misc_feature (20)..(20): n is thymidine
  misc_feature (21)..(21): 3'-3 attached terminal deoxyabasic moiety
uggucugcggaaccggugann

SEQ ID NO: 1777 - RNA, 21 nt, Artificial Sequence
  Description of Artificial Sequence: siNA sense
  misc_feature (1)..(1): 5'-3 attached terminal deoxyabasic moiety
  misc_feature (1)..(2): 2'-deoxy
  misc_feature (3)..(5): 2'-deoxy-2'-fluoro
  misc_feature (6)..(6): 2'-deoxy
  misc_feature (7)..(7): 2'-deoxy-2'-fluoro
  misc_feature (8)..(11): 2'-deoxy
  misc_feature (12)..(13): 2'-deoxy-2'-fluoro
  misc_feature (14)..(15): 2'-deoxy
  misc_feature (16)..(16): 2'-deoxy-2'-fluoro
  misc_feature (17)..(19): 2'-deoxy
  misc_feature (20)..(20): n is thymidine
  misc_feature (21)..(21): 3'-3 attached terminal deoxyabasic moiety
ggucugcggaaccggugagnn

SEQ ID NO: 1778 - RNA, 21 nt, Artificial Sequence
  Description of Artificial Sequence: siNA sense
  misc_feature (1)..(1): 5'-3 attached terminal deoxyabasic moiety
  misc_feature (1)..(1): 2'-deoxy
  misc_feature (2)..(4): 2'-deoxy-2'-fluoro
  misc_feature (5)..(5): 2'-deoxy
  misc_feature (6)..(6): 2'-deoxy-2'-fluoro
  misc_feature (7)..(10): 2'-deoxy
  misc_feature (11)..(12): 2'-deoxy-2'-fluoro
  misc_feature (13)..(14): 2'-deoxy
  misc_feature (15)..(15): 2'-deoxy-2'-fluoro
  misc_feature (16)..(18): 2'-deoxy
  misc_feature (19)..(19): 2'-deoxy-2'-fluoro
  misc_feature (20)..(20): n is thymidine
  misc_feature (21)..(21): 3'-3 attached terminal deoxyabasic moiety
gucugcggaaccggugagunn

SEQ ID NO: 1779 - RNA, 21 nt, Artificial Sequence
  Description of Artificial Sequence: siNA sense
  misc_feature (1)..(1): 5'-3 attached terminal deoxyabasic moiety
  misc_feature (1)..(3): 2'-deoxy-2'-fluoro
  misc_feature (4)..(4): 2'-deoxy
  misc_feature (5)..(5): 2'-deoxy-2'-fluoro
  misc_feature (6)..(9): 2'-deoxy
  misc_feature (10)..(11): 2'-deoxy-2'-fluoro
  misc_feature (12)..(13): 2'-deoxy
  misc_feature (14)..(14): 2'-deoxy-2'-fluoro
  misc_feature (15)..(17): 2'-deoxy
  misc_feature (18)..(18): 2'-deoxy-2'-fluoro
  misc_feature (19)..(19): 2'-deoxy
  misc_feature (20)..(20): n is thymidine
  misc_feature (21)..(21): 3'-3 attached terminal deoxyabasic moiety
ucugcggaaccggugaguann

SEQ ID NO: 1780 - RNA, 21 nt, Artificial Sequence
  Description of Artificial Sequence: siNA sense
  misc_feature (1)..(1): 5'-3 attached terminal deoxyabasic moiety
  misc_feature (1)..(1): 2'-deoxy-2'-fluoro
  misc_feature (2)..(2): 2'-deoxy
  misc_feature (3)..(3): 2'-deoxy-2'-fluoro
  misc_feature (4)..(7): 2'-deoxy
  misc_feature (8)..(9): 2'-deoxy-2'-fluoro
  misc_feature (10)..(11): 2'-deoxy
  misc_feature (12)..(12): 2'-deoxy-2'-fluoro
  misc_feature (13)..(15): 2'-deoxy
  misc_feature (16)..(16): 2'-deoxy-2'-fluoro
  misc_feature (17)..(17): 2'-deoxy
  misc_feature (18)..(18): 2'-deoxy-2'-fluoro
  misc_feature (19)..(19): 2'-deoxy
  misc_feature (20)..(20): n is thymidine
  misc_feature (21)..(21): 3'-3 attached terminal deoxyabasic moiety
ugcggaaccggugaguacann

SEQ ID NO: 1781 - RNA, 21 nt, Artificial Sequence
  Description of Artificial Sequence: siNA sense
  misc_feature (1)..(1): 5'-3 attached terminal deoxyabasic moiety
  misc_feature (1)..(1): 2'-deoxy
  misc_feature (2)..(2): 2'-deoxy-2'-fluoro
  misc_feature (3)..(6): 2'-deoxy
  misc_feature (7)..(8): 2'-deoxy-2'-fluoro
  misc_feature (9)..(10): 2'-deoxy
  misc_feature (11)..(11): 2'-deoxy-2'-fluoro
  misc_feature (12)..(14): 2'-deoxy
  misc_feature (15)..(15): 2'-deoxy-2'-fluoro
  misc_feature (16)..(16): 2'-deoxy
  misc_feature (17)..(17): 2'-deoxy-2'-fluoro
  misc_feature (18)..(18): 2'-deoxy
  misc_feature (19)..(19): 2'-deoxy-2'-fluoro
  misc_feature (20)..(20): n is thymidine
  misc_feature (21)..(21): 3'-3 attached terminal deoxyabasic moiety
gcggaaccggugaguacacnn

SEQ ID NO: 1782 - RNA, 21 nt, Artificial Sequence
  Description of Artificial Sequence: siNA sense
  misc_feature (1)..(1): 5'-3 attached terminal deoxyabasic moiety
  misc_feature (1)..(3): 2'-deoxy
  misc_feature (4)..(5): 2'-deoxy-2'-fluoro
  misc_feature (6)..(7): 2'-deoxy
  misc_feature (8)..(8): 2'-deoxy-2'-fluoro
  misc_feature (9)..(11): 2'-deoxy
  misc_feature (12)..(12): 2'-deoxy-2'-fluoro
  misc_feature (13)..(13): 2'-deoxy
  misc_feature (14)..(14): 2'-deoxy-2'-fluoro
  misc_feature (15)..(15): 2'-deoxy
  misc_feature (16)..(17): 2'-deoxy-2'-fluoro
  misc_feature (18)..(19): 2'-deoxy
  misc_feature (20)..(20): n is thymidine
  misc_feature (21)..(21): 3'-3 attached terminal deoxyabasic moiety
gaaccggugaguacaccggnn

SEQ ID NO: 1783 - RNA, 21 nt, Artificial Sequence
  Description of Artificial Sequence: siNA sense
  misc_feature (1)..(1): 5'-3 attached terminal deoxyabasic moiety
  misc_feature (1)..(2): 2'-deoxy
  misc_feature (3)..(4): 2'-deoxy-2'-fluoro
  misc_feature (5)..(6): 2'-deoxy
  misc_feature (7)..(7): 2'-deoxy-2'-fluoro
  misc_feature (8)..(10): 2'-deoxy
  misc_feature (11)..(11): 2'-deoxy-2'-fluoro
  misc_feature (12)..(12): 2'-deoxy
  misc_feature (13)..(13): 2'-deoxy-2'-fluoro
  misc_feature (14)..(14): 2'-deoxy
  misc_feature (15)..(16): 2'-deoxy-2'-fluoro
  misc_feature (17)..(19): 2'-deoxy
  misc_feature (20)..(20): n is thymidine
  misc_feature (21)..(21): 3'-3 attached terminal deoxyabasic moiety
aaccggugaguacaccggann

SEQ ID NO: 1784 - RNA, 21 nt, Artificial Sequence
  Description of Artificial Sequence: siNA sense
  misc_feature (1)..(1): 5'-3 attached terminal deoxyabasic moiety
  misc_feature (1)..(1): 2'-deoxy
  misc_feature (2)..(3): 2'-deoxy-2'-fluoro
  misc_feature (4)..(5): 2'-deoxy
  misc_feature (6)..(6): 2'-deoxy-2'-fluoro
  misc_feature (7)..(9): 2'-deoxy
  misc_feature (10)..(10): 2'-deoxy-2'-fluoro
  misc_feature (11)..(11): 2'-deoxy
  misc_feature (12)..(12): 2'-deoxy-2'-fluoro
  misc_feature (13)..(13): 2'-deoxy
  misc_feature (14)..(15): 2'-deoxy-2'-fluoro
  misc_feature (16)..(19): 2'-deoxy
  misc_feature (20)..(20): n is thymidine
  misc_feature (21)..(21): 3'-3 attached terminal deoxyabasic moiety
accggugaguacaccggaann

SEQ ID NO: 1785 - RNA, 21 nt, Artificial Sequence
  Description of Artificial Sequence: siNA sense
  misc_feature (1)..(1): 5'-3 attached terminal deoxyabasic moiety
  misc_feature (1)..(2): 2'-deoxy-2'-fluoro
  misc_feature (3)..(4): 2'-deoxy
  misc_feature (5)..(5): 2'-deoxy-2'-fluoro
  misc_feature (6)..(8): 2'-deoxy
  misc_feature (9)..(9): 2'-deoxy-2'-fluoro
  misc_feature (10)..(10): 2'-deoxy
  misc_feature (11)..(11): 2'-deoxy-2'-fluoro
  misc_feature (12)..(12): 2'-deoxy
  misc_feature (13)..(14): 2'-deoxy-2'-fluoro
  misc_feature (15)..(18): 2'-deoxy
  misc_feature (19)..(19): 2'-deoxy-2'-fluoro
  misc_feature (20)..(20): n is thymidine
  misc_feature (21)..(21): 3'-3 attached terminal deoxyabasic moiety
ccggugaguacaccggaaunn

SEQ ID NO: 1786 - RNA, 21 nt, Artificial Sequence
  Description of Artificial Sequence: siNA sense
  misc_feature (1)..(1): 5'-3 attached terminal deoxyabasic moiety
  misc_feature (1)..(1): 2'-deoxy
  misc_feature (2)..(2): 2'-deoxy-2'-fluoro
  misc_feature (3)..(8): 2'-deoxy
  misc_feature (9)..(12): 2'-deoxy-2'-fluoro
  misc_feature (13)..(13): 2'-deoxy
  misc_feature (14)..(14): 2'-deoxy-2'-fluoro
  misc_feature (15)..(16): 2'-deoxy
  misc_feature (17)..(17): 2'-deoxy-2'-fluoro
  misc_feature (18)..(18): 2'-deoxy
  misc_feature (19)..(19): 2'-deoxy-2'-fluoro
  misc_feature (20)..(20): n is thymidine
  misc_feature (21)..(21): 3'-3 attached terminal deoxyabasic moiety
gcgaaaggccuugugguacnn

SEQ ID NO: 1787 - RNA, 21 nt, Artificial Sequence
  Description of Artificial Sequence: siNA sense
  misc_feature (1)..(1): 5'-3 attached terminal deoxyabasic moiety
  misc_feature (1)..(1): 2'-deoxy-2'-fluoro
  misc_feature (2)..(7): 2'-deoxy
  misc_feature (8)..(11): 2'-deoxy-2'-fluoro
  misc_feature (12)..(12): 2'-deoxy
  misc_feature (13)..(13): 2'-deoxy-2'-fluoro
  misc_feature (14)..(15): 2'-deoxy
  misc_feature (16)..(16): 2'-deoxy-2'-fluoro
  misc_feature (17)..(17): 2'-deoxy
  misc_feature (18)..(19): 2'-deoxy-2'-fluoro
  misc_feature (20)..(20): n is thymidine
  misc_feature (21)..(21): 3'-3 attached terminal deoxyabasic moiety
cgaaaggccuugugguacunn

SEQ ID NO: 1788 - RNA, 21 nt, Artificial Sequence
  Description of Artificial Sequence: siNA sense
  misc_feature (1)..(1): 5'-3 attached terminal deoxyabasic moiety
  misc_feature (1)..(6): 2'-deoxy
  misc_feature (7)..(10): 2'-deoxy-2'-fluoro
  misc_feature (11)..(11): 2'-deoxy
  misc_feature (12)..(12): 2'-deoxy-2'-fluoro
  misc_feature (13)..(14): 2'-deoxy
  misc_feature (15)..(15): 2'-deoxy-2'-fluoro
  misc_feature (16)..(16): 2'-deoxy
  misc_feature (17)..(18): 2'-deoxy-2'-fluoro
  misc_feature (19)..(19): 2'-deoxy
  misc_feature (20)..(20): n is thymidine
  misc_feature (21)..(21): 3'-3 attached terminal deoxyabasic moiety
gaaaggccuugugguacugnn

SEQ ID NO: 1789 - RNA, 21 nt, Artificial Sequence
  Description of Artificial Sequence: siNA sense
  misc_feature (1)..(1): 5'-3 attached terminal deoxyabasic moiety
  misc_feature (1)..(5): 2'-deoxy
  misc_feature (6)..(9): 2'-deoxy-2'-fluoro
  misc_feature (10)..(10): 2'-deoxy
  misc_feature (11)..(11): 2'-deoxy-2'-fluoro
  misc_feature (12)..(13): 2'-deoxy
  misc_feature (14)..(14): 2'-deoxy-2'-fluoro
  misc_feature (15)..(15): 2'-deoxy
  misc_feature (16)..(17): 2'-deoxy-2'-fluoro
  misc_feature (18)..(18): 2'-deoxy
  misc_feature (19)..(19): 2'-deoxy-2'-fluoro
  misc_feature (20)..(20): n is thymidine
  misc_feature (21)..(21): 3'-3 attached terminal deoxyabasic moiety
aaaggccuugugguacugcnn

SEQ ID NO: 1790 - RNA, 21 nt, Artificial Sequence
  Description of Artificial Sequence: siNA sense
  misc_feature (1)..(1): 5'-3 attached terminal deoxyabasic moiety
  misc_feature (1)..(4): 2'-deoxy
  misc_feature (5)..(8): 2'-deoxy-2'-fluoro
  misc_feature (9)..(9): 2'-deoxy
  misc_feature (10)..(10): 2'-deoxy-2'-fluoro
  misc_feature (11)..(12): 2'-deoxy
  misc_feature (13)..(13): 2'-deoxy-2'-fluoro
  misc_feature (14)..(14): 2'-deoxy
  misc_feature (15)..(16): 2'-deoxy-2'-fluoro
  misc_feature (17)..(17): 2'-deoxy
  misc_feature (18)..(19): 2'-deoxy-2'-fluoro
  misc_feature (20)..(20): n is thymidine
  misc_feature (21)..(21): 3'-3 attached terminal deoxyabasic moiety
aaggccuugugguacugccnn

SEQ ID NO: 1791 - RNA, 21 nt, Artificial Sequence
  Description of Artificial Sequence: siNA sense
  misc_feature (1)..(1): 5'-3 attached terminal deoxyabasic moiety
  misc_feature (1)..(2): 2'-deoxy
  misc_feature (3)..(6): 2'-deoxy-2'-fluoro
  misc_feature (7)..(7): 2'-deoxy
  misc_feature (8)..(8): 2'-deoxy-2'-fluoro
  misc_feature (9)..(10): 2'-deoxy
  misc_feature (11)..(11): 2'-deoxy-2'-fluoro
  misc_feature (12)..(12): 2'-deoxy
  misc_feature (13)..(14): 2'-deoxy-2'-fluoro
  misc_feature (15)..(15): 2'-deoxy
  misc_feature (16)..(18): 2'-deoxy-2'-fluoro
  misc_feature (19)..(19): 2'-deoxy
  misc_feature (20)..(20): n is thymidine
  misc_feature (21)..(21): 3'-3 attached terminal deoxyabasic moiety
ggccuugugguacugccugnn

SEQ ID NO: 1792 - RNA, 21 nt, Artificial Sequence
  Description of Artificial Sequence: siNA sense
  misc_feature (1)..(1): 5'-3 attached terminal deoxyabasic moiety
  misc_feature (1)..(1): 2'-deoxy
  misc_feature (2)..(5): 2'-deoxy-2'-fluoro
  misc_feature (6)..(6): 2'-deoxy
  misc_feature (7)..(7): 2'-deoxy-2'-fluoro
  misc_feature (8)..(9): 2'-deoxy
  misc_feature (10)..(10): 2'-deoxy-2'-fluoro
  misc_feature (11)..(11): 2'-deoxy
  misc_feature (12)..(13): 2'-deoxy-2'-fluoro
  misc_feature (14)..(14): 2'-deoxy
  misc_feature (15)..(17): 2'-deoxy-2'-fluoro
  misc_feature (18)..(19): 2'-deoxy
  misc_feature (20)..(20): n is thymidine
  misc_feature (21)..(21): 3'-3 attached terminal deoxyabasic moiety
gccuugugguacugccugann

SEQ ID NO: 1793 - RNA, 21 nt, Artificial Sequence
  Description of Artificial Sequence: siNA sense
  misc_feature (1)..(1): 5'-3 attached terminal deoxyabasic moiety
  misc_feature (1)..(4): 2'-deoxy-2'-fluoro
  misc_feature (5)..(5): 2'-deoxy
  misc_feature (6)..(6): 2'-deoxy-2'-fluoro
  misc_feature (7)..(8): 2'-deoxy
  misc_feature (9)..(9): 2'-deoxy-2'-fluoro
  misc_feature (10)..(10): 2'-deoxy
  misc_feature (11)..(12): 2'-deoxy-2'-fluoro
  misc_feature (13)..(13): 2'-deoxy
  misc_feature (14)..(16): 2'-deoxy-2'-fluoro
  misc_feature (17)..(18): 2'-deoxy
  misc_feature (19)..(19): 2'-deoxy-2'-fluoro
  misc_feature (20)..(20): n is thymidine
  misc_feature (21)..(21): 3'-3 attached terminal deoxyabasic moiety
ccuugugguacugccugaunn

SEQ ID NO: 1794 - RNA, 21 nt, Artificial Sequence
  Description of Artificial Sequence: siNA sense
  misc_feature (1)..(1): 5'-3 attached terminal deoxyabasic moiety
  misc_feature (1)..(1): 2'-deoxy
  misc_feature (2)..(3): 2'-deoxy-2'-fluoro
  misc_feature (4)..(4): 2'-deoxy
  misc_feature (5)..(7): 2'-deoxy-2'-fluoro
  misc_feature (8)..(9): 2'-deoxy
  misc_feature (10)..(10): 2'-deoxy-2'-fluoro
  misc_feature (11)..(14): 2'-deoxy
  misc_feature (15)..(15): 2'-deoxy-2'-fluoro
  misc_feature (16)..(16): 2'-deoxy
  misc_feature (17)..(19): 2'-deoxy-2'-fluoro
  misc_feature (20)..(20): n is thymidine
  misc_feature (21)..(21): 3'-3 attached terminal deoxyabasic moiety
acugccugauagggugcuunn

SEQ ID NO: 1795 - RNA, 21 nt, Artificial Sequence
  Description of Artificial Sequence: siNA sense
  misc_feature (1)..(1): 5'-3 attached terminal deoxyabasic moiety
  misc_feature (1)..(1): 2'-deoxy
  misc_feature (2)..(4): 2'-deoxy-2'-fluoro
  misc_feature (5)..(6): 2'-deoxy
  misc_feature (7)..(7): 2'-deoxy-2'-fluoro
  misc_feature (8)..(11): 2'-deoxy
  misc_feature (12)..(12): 2'-deoxy-2'-fluoro
  misc_feature (13)..(13): 2'-deoxy
  misc_feature (14)..(16): 2'-deoxy-2'-fluoro
  misc_feature (17)..(17): 2'-deoxy
  misc_feature (18)..(18): 2'-deoxy-2'-fluoro
  misc_feature (19)..(19): 2'-deoxy
  misc_feature (20)..(20): n is thymidine
  misc_feature (21)..(21): 3'-3 attached terminal deoxyabasic moiety
gccugauagggugcuugcgnn

SEQ ID NO: 1796 - RNA, 21 nt, Artificial Sequence
  Description of Artificial Sequence: siNA sense
  misc_feature (1)..(1): 5'-3 attached terminal deoxyabasic moiety
  misc_feature (1)..(2): 2'-deoxy-2'-fluoro
  misc_feature (3)..(4): 2'-deoxy
  misc_feature (5)..(5): 2'-deoxy-2'-fluoro
  misc_feature (6)..(9): 2'-deoxy
  misc_feature (10)..(10): 2'-deoxy-2'-fluoro
  misc_feature (11)..(11): 2'-deoxy
  misc_feature (12)..(14): 2'-deoxy-2'-fluoro
  misc_feature (15)..(15): 2'-deoxy
  misc_feature (16)..(16): 2'-deoxy-2'-fluoro
  misc_feature (17)..(19): 2'-deoxy
  misc_feature (20)..(20): n is thymidine
  misc_feature (21)..(21): 3'-3 attached terminal deoxyabasic moiety
cugauagggugcuugcgagnn

SEQ ID NO: 1797 - RNA, 21 nt, Artificial Sequence
  Description of Artificial Sequence: siNA sense
  misc_feature (1)..(1): 5'-3 attached terminal deoxyabasic moiety
  misc_feature (1)..(1): 2'-deoxy-2'-fluoro
  misc_feature (2)..(3): 2'-deoxy
  misc_feature (4)..(4): 2'-deoxy-2'-fluoro
  misc_feature (5)..(8): 2'-deoxy
  misc_feature (9)..(9): 2'-deoxy-2'-fluoro
  misc_feature (10)..(10): 2'-deoxy
  misc_feature (11)..(13): 2'-deoxy-2'-fluoro
  misc_feature (14)..(14): 2'-deoxy
  misc_feature (15)..(15): 2'-deoxy-2'-fluoro
  misc_feature (16)..(18): 2'-deoxy
  misc_feature (19)..(19): 2'-deoxy-2'-fluoro
  misc_feature (20)..(20): n is thymidine
  misc_feature (21)..(21): 3'-3 attached terminal deoxyabasic moiety
ugauagggugcuugcgagunn

SEQ ID NO: 1798 - RNA, 21 nt, Artificial Sequence
  Description of Artificial Sequence: siNA sense
  misc_feature (1)..(1): 5'-3 attached terminal deoxyabasic moiety
  misc_feature (1)..(1): 2'-deoxy
  misc_feature (2)..(2): 2'-deoxy-2'-fluoro
  misc_feature (3)..(6): 2'-deoxy
  misc_feature (7)..(7): 2'-deoxy-2'-fluoro
  misc_feature (8)..(8): 2'-deoxy
  misc_feature (9)..(11): 2'-deoxy-2'-fluoro
  misc_feature (12)..(12): 2'-deoxy
  misc_feature (13)..(13): 2'-deoxy-2'-fluoro
  misc_feature (14)..(16): 2'-deoxy
  misc_feature (17)..(17): 2'-deoxy-2'-fluoro
  misc_feature (18)..(18): 2'-deoxy
  misc_feature (19)..(19): 2'-deoxy-2'-fluoro
  misc_feature (20)..(20): n is thymidine
  misc_feature (21)..(21): 3'-3 attached terminal deoxyabasic moiety
auagggugcuugcgagugcnn

SEQ ID NO: 1799 - RNA, 21 nt, Artificial Sequence
  Description of Artificial Sequence: siNA sense
  misc_feature (1)..(1): 5'-3 attached terminal deoxyabasic moiety
  misc_feature (1)..(1): 2'-deoxy-2'-fluoro
  misc_feature (2)..(5): 2'-deoxy
  misc_feature (6)..(6): 2'-deoxy-2'-fluoro
  misc_feature (7)..(7): 2'-deoxy
  misc_feature (8)..(10): 2'-deoxy-2'-fluoro
  misc_feature (11)..(11): 2'-deoxy
  misc_feature (12)..(12): 2'-deoxy-2'-fluoro
  misc_feature (13)..(15): 2'-deoxy
  misc_feature (16)..(16): 2'-deoxy-2'-fluoro
  misc_feature (17)..(17): 2'-deoxy
  misc_feature (18)..(19): 2'-deoxy-2'-fluoro
  misc_feature (20)..(20): n is thymidine
  misc_feature (21)..(21): 3'-3 attached terminal deoxyabasic moiety
uagggugcuugcgagugccnn

SEQ ID NO: 1800 - RNA, 21 nt, Artificial Sequence
  Description of Artificial Sequence: siNA sense
  misc_feature (1)..(1): 5'-3 attached terminal deoxyabasic moiety
  misc_feature (1)..(3): 2'-deoxy
  misc_feature (4)..(4): 2'-deoxy-2'-fluoro
  misc_feature (5)..(5): 2'-deoxy
  misc_feature (6)..(8): 2'-deoxy-2'-fluoro
  misc_feature (9)..(9): 2'-deoxy
  misc_feature (10)..(10): 2'-deoxy-2'-fluoro
  misc_feature (11)..(13): 2'-deoxy
  misc_feature (14)..(14): 2'-deoxy-2'-fluoro
  misc_feature (15)..(15): 2'-deoxy
  misc_feature (16)..(19): 2'-deoxy-2'-fluoro
  misc_feature (20)..(20): n is thymidine
  misc_feature (21)..(21): 3'-3 attached terminal deoxyabasic moiety
gggugcuugcgagugccccnn

SEQ ID NO: 1801 - RNA, 21 nt, Artificial Sequence
  Description of Artificial Sequence: siNA sense
  misc_feature (1)..(1): 5'-3 attached terminal deoxyabasic moiety
  misc_feature (1)..(2): 2'-deoxy
  misc_feature (3)..(3): 2'-deoxy-2'-fluoro
  misc_feature (4)..(4): 2'-deoxy
  misc_feature (5)..(7): 2'-deoxy-2'-fluoro
  misc_feature (8)..(8): 2'-deoxy
  misc_feature (9)..(9): 2'-deoxy-2'-fluoro
  misc_feature (10)..(12): 2'-deoxy
  misc_feature (13)..(13): 2'-deoxy-2'-fluoro
  misc_feature (14)..(14): 2'-deoxy
  misc_feature (15)..(18): 2'-deoxy-2'-fluoro
  misc_feature (19)..(19): 2'-deoxy
  misc_feature (20)..(20): n is thymidine
  misc_feature (21)..(21): 3'-3 attached terminal deoxyabasic moiety
ggugcuugcgagugccccgnn

SEQ ID NO: 1802 - RNA, 21 nt, Artificial Sequence
  Description of Artificial Sequence: siNA sense
  misc_feature (1)..(1): 5'-3 attached terminal deoxyabasic moiety
  misc_feature (1)..(1): 2'-deoxy
  misc_feature (2)..(4): 2'-deoxy-2'-fluoro
  misc_feature (5)..(5): 2'-deoxy
  misc_feature (6)..(6): 2'-deoxy-2'-fluoro
  misc_feature (7)..(9): 2'-deoxy
  misc_feature (10)..(10): 2'-deoxy-2'-fluoro
  misc_feature (11)..(11): 2'-deoxy
  misc_feature (12)..(15): 2'-deoxy-2'-fluoro
  misc_feature (16)..(19): 2'-deoxy
  misc_feature (20)..(20): n is thymidine
  misc_feature (21)..(21): 3'-3 attached terminal deoxyabasic moiety
gcuugcgagugccccgggann

SEQ ID NO: 1803 - RNA, 21 nt, Artificial Sequence
  Description of Artificial Sequence: siNA sense
  misc_feature (1)..(1): 5'-3 attached terminal deoxyabasic moiety
  misc_feature (1)..(3): 2'-deoxy
  misc_feature (4)..(4): 2'-deoxy-2'-fluoro
  misc_feature (5)..(5): 2'-deoxy
  misc_feature (6)..(8): 2'-deoxy-2'-fluoro
  misc_feature (9)..(9): 2'-deoxy
  misc_feature (10)..(10): 2'-deoxy-2'-fluoro
  misc_feature (11)..(14): 2'-deoxy
  misc_feature (15)..(19): 2'-deoxy-2'-fluoro
  misc_feature (20)..(20): n is thymidine
  misc_feature (21)..(21): 3'-3 attached terminal deoxyabasic moiety
cuugcgagugccccgggagnn

SEQ ID NO: 1804 - RNA, 21 nt, Artificial Sequence
  Description of Artificial Sequence: siNA sense
  misc_feature (1)..(1): 5'-3 attached terminal deoxyabasic moiety
  misc_feature (1)..(2): 2'-deoxy-2'-fluoro
  misc_feature (3)..(3): 2'-deoxy
  misc_feature (4)..(4): 2'-deoxy-2'-fluoro
  misc_feature (5)..(7): 2'-deoxy
  misc_feature (8)..(8): 2'-deoxy-2'-fluoro
  misc_feature (9)..(9): 2'-deoxy
  misc_feature (10)..(13): 2'-deoxy-2'-fluoro
  misc_feature (14)..(19): 2'-deoxy
  misc_feature (20)..(20): n is thymidine
  misc_feature (21)..(21): 3'-3 attached terminal deoxyabasic moiety
uugcgagugccccgggaggnn

SEQ ID NO: 1805 - RNA, 21 nt, Artificial Sequence
  Description of Artificial Sequence: siNA sense
  misc_feature (1)..(1): 5'-3 attached terminal deoxyabasic moiety
  misc_feature (1)..(1): 2'-deoxy-2'-fluoro
  misc_feature (2)..(2): 2'-deoxy
  misc_feature (3)..(3): 2'-deoxy-2'-fluoro
  misc_feature (4)..(6): 2'-deoxy
  misc_feature (7)..(7): 2'-deoxy-2'-fluoro
  misc_feature (8)..(8): 2'-deoxy
  misc_feature (9)..(12): 2'-deoxy-2'-fluoro
  misc_feature (13)..(18): 2'-deoxy
  misc_feature (19)..(19): 2'-deoxy-2'-fluoro
  misc_feature (20)..(20): n is thymidine
  misc_feature (21)..(21): 3'-3 attached terminal deoxyabasic moiety
ugcgagugccccgggaggunn

SEQ ID NO: 1806 - RNA, 21 nt, Artificial Sequence
  Description of Artificial Sequence: siNA sense
  misc_feature (1)..(1): 5'-3 attached terminal deoxyabasic moiety
  misc_feature (1)..(1): 2'-deoxy
  misc_feature (2)..(2): 2'-deoxy-2'-fluoro
  misc_feature (3)..(5): 2'-deoxy
  misc_feature (6)..(6): 2'-deoxy-2'-fluoro
  misc_feature (7)..(7): 2'-deoxy
  misc_feature (8)..(11): 2'-deoxy-2'-fluoro
  misc_feature (12)..(17): 2'-deoxy
  misc_feature (18)..(19): 2'-deoxy-2'-fluoro
  misc_feature (20)..(20): n is thymidine
  misc_feature (21)..(21): 3'-3 attached terminal deoxyabasic moiety
gcgagugccccgggaggucnn

SEQ ID NO: 1807 - RNA, 21 nt, Artificial Sequence
  Description of Artificial Sequence: siNA sense
  misc_feature (1)..(1): 5'-3 attached terminal deoxyabasic moiety
  misc_feature (1)..(1): 2'-deoxy-2'-fluoro
  misc_feature (2)..(4): 2'-deoxy
  misc_feature (5)..(5): 2'-deoxy-2'-fluoro
  misc_feature (6)..(6): 2'-deoxy
  misc_feature (7)..(10): 2'-deoxy-2'-fluoro
  misc_feature (11)..(16): 2'-deoxy
  misc_feature (17)..(19): 2'-deoxy-2'-fluoro
  misc_feature (20)..(20): n is thymidine
  misc_feature (21)..(21): 3'-3 attached terminal deoxyabasic moiety
cgagugccccgggaggucunn

SEQ ID NO: 1808 - RNA, 21 nt, Artificial Sequence
  Description of Artificial Sequence: siNA sense
  misc_feature (1)..(1): 5'-3 attached terminal deoxyabasic moiety
  misc_feature (1)..(3): 2'-deoxy
  misc_feature (4)..(4): 2'-deoxy-2'-fluoro
  misc_feature (5)..(5): 2'-deoxy
  misc_feature (6)..(9): 2'-deoxy-2'-fluoro
  misc_feature (10)..(15): 2'-deoxy
  misc_feature (16)..(19): 2'-deoxy-2'-fluoro
  misc_feature (20)..(20): n is thymidine
  misc_feature (21)..(21): 3'-3 attached terminal deoxyabasic moiety
gagugccccgggaggucucnn

SEQ ID NO: 1809 - RNA, 21 nt, Artificial Sequence
  Description of Artificial Sequence: siNA sense
  misc_feature (1)..(1): 5'-3 attached terminal deoxyabasic moiety
  misc_feature (1)..(1): 2'-deoxy
  misc_feature (2)..(2): 2'-deoxy-2'-fluoro
  misc_feature (3)..(3): 2'-deoxy
  misc_feature (4)..(7): 2'-deoxy-2'-fluoro
  misc_feature (8)..(13): 2'-deoxy
  misc_feature (14)..(17): 2'-deoxy-2'-fluoro
  misc_feature (18)..(18): 2'-deoxy
  misc_feature (19)..(19): 2'-deoxy-2'-fluoro
  misc_feature (20)..(20): n is thymidine
  misc_feature (21)..(21): 3'-3 attached terminal deoxyabasic moiety
gugccccgggaggucucgunn

SEQ ID NO: 1810 - RNA, 21 nt, Artificial Sequence
  Description of Artificial Sequence: siNA sense
  misc_feature (1)..(1): 5'-3 attached terminal deoxyabasic moiety
  misc_feature (1)..(1): 2'-deoxy-2'-fluoro
  misc_feature (2)..(2): 2'-deoxy
  misc_feature (3)..(6): 2'-deoxy-2'-fluoro
  misc_feature (7)..(12): 2'-deoxy
  misc_feature (13)..(16): 2'-deoxy-2'-fluoro
  misc_feature (17)..(17): 2'-deoxy
  misc_feature (18)..(18): 2'-deoxy-2'-fluoro
  misc_feature (19)..(19): 2'-deoxy
  misc_feature (20)..(20): n is thymidine
  misc_feature (21)..(21): 3'-3 attached terminal deoxyabasic moiety
ugccccgggaggucucguann

SEQ ID NO: 1811 - RNA, 21 nt, Artificial Sequence
  Description of Artificial Sequence: siNA sense
  misc_feature (1)..(1): 5'-3 attached terminal deoxyabasic moiety
  misc_feature (1)..(5): 2'-deoxy
  misc_feature (6)..(9): 2'-deoxy-2'-fluoro
  misc_feature (10)..(10): 2'-deoxy
  misc_feature (11)..(11): 2'-deoxy-2'-fluoro
  misc_feature (12)..(14): 2'-deoxy
  misc_feature (15)..(16): 2'-deoxy-2'-fluoro
  misc_feature (17)..(17): 2'-deoxy
  misc_feature (18)..(18): 2'-deoxy-2'-fluoro
  misc_feature (19)..(19): 2'-deoxy
  misc_feature (20)..(20): n is thymidine
  misc_feature (21)..(21): 3'-3 attached terminal deoxyabasic moiety
ggaggucucguagaccgugnn

SEQ ID NO: 1812 - RNA, 21 nt, Artificial Sequence
  Description of Artificial Sequence: siNA antisense
  misc_feature (1)..(1): 2'-O-methyl
  misc_feature (2)..(3): 2'-deoxy-2'-fluoro
  misc_feature (4)..(4): 2'-O-methyl
  misc_feature (5)..(6): 2'-deoxy-2'-fluoro
  misc_feature (7)..(7): 2'-O-methyl
  misc_feature (8)..(8): 2'-deoxy-2'-fluoro
  misc_feature (9)..(10): 2'-O-methyl
  misc_feature (11)..(17): 2'-deoxy-2'-fluoro
  misc_feature (18)..(19): 2'-O-methyl
  misc_feature (20)..(21): internucleotide phosphorothioate linkage
accacuauggcucucccggnn

SEQ ID NO: 1813 - RNA, 21 nt, Artificial Sequence
  Description of Artificial Sequence: siNA antisense
  misc_feature (1)..(2): 2'-O-methyl
  misc_feature (3)..(4): 2'-deoxy-2'-fluoro
  misc_feature (5)..(5): 2'-O-methyl
  misc_feature (6)..(7): 2'-deoxy-2'-fluoro
  misc_feature (8)..(8): 2'-O-methyl
  misc_feature (9)..(9): 2'-deoxy-2'-fluoro
  misc_feature (10)..(11): 2'-O-methyl
  misc_feature (12)..(18): 2'-deoxy-2'-fluoro
  misc_feature (19)..(19): 2'-O-methyl
  misc_feature (20)..(21): internucleotide phosphorothioate linkage
gaccacuauggcucucccgnn

SEQ ID NO: 1814 - RNA, 21 nt, Artificial Sequence
  Description of Artificial Sequence: siNA antisense
  misc_feature (1)..(3): 2'-O-methyl
  misc_feature (4)..(5): 2'-deoxy-2'-fluoro
  misc_feature (6)..(6): 2'-O-methyl
  misc_feature (7)..(8): 2'-deoxy-2'-fluoro
  misc_feature (9)..(9): 2'-O-methyl
  misc_feature (10)..(10): 2'-deoxy-2'-fluoro
  misc_feature (11)..(12): 2'-O-methyl
  misc_feature (13)..(19): 2'-deoxy-2'-fluoro
  misc_feature (20)..(21): internucleotide phosphorothioate linkage
agaccacuauggcucucccnn

SEQ ID NO: 1815 - RNA, 21 nt, Artificial Sequence
  Description of Artificial Sequence: siNA antisense
  misc_feature (1)..(1): 2'-deoxy-2'-fluoro
  misc_feature (2)..(2): 2'-O-methyl
  misc_feature (3)..(4): 2'-deoxy-2'-fluoro
  misc_feature (5)..(6): 2'-O-methyl
  misc_feature (7)..(10): 2'-deoxy-2'-fluoro
  misc_feature (11)..(11): 2'-O-methyl
  misc_feature (12)..(12): 2'-deoxy-2'-fluoro
  misc_feature (13)..(15): 2'-O-methyl
  misc_feature (16)..(17): 2'-deoxy-2'-fluoro
  misc_feature (18)..(18): 2'-O-methyl
  misc_feature (19)..(19): 2'-deoxy-2'-fluoro
  misc_feature (20)..(21): internucleotide phosphorothioate linkage
caccgguuccgcagaccacnn

SEQ ID NO: 1816 - RNA, 21 nt, Artificial Sequence
  Description of Artificial Sequence: siNA antisense
  misc_feature (1)..(2): 2'-deoxy-2'-fluoro
  misc_feature (3)..(3): 2'-O-methyl
  misc_feature (4)..(5): 2'-deoxy-2'-fluoro
  misc_feature (6)..(7): 2'-O-methyl
  misc_feature (8)..(11): 2'-deoxy-2'-fluoro
  misc_feature (12)..(12): 2'-O-methyl
  misc_feature (13)..(13): 2'-deoxy-2'-fluoro
  misc_feature (14)..(16): 2'-O-methyl
  misc_feature (17)..(18): 2'-deoxy-2'-fluoro
  misc_feature (19)..(19): 2'-O-methyl
  misc_feature (20)..(21): internucleotide phosphorothioate linkage
ucaccgguuccgcagaccann

SEQ ID NO: 1817 - RNA, 21 nt, Artificial Sequence
  Description of Artificial Sequence: siNA antisense
  misc_feature (1)..(3): 2'-deoxy-2'-fluoro
  misc_feature (4)..(4): 2'-O-methyl
  misc_feature (5)..(6): 2'-deoxy-2'-fluoro
  misc_feature (7)..(8): 2'-O-methyl
  misc_feature (9)..(12): 2'-deoxy-2'-fluoro
  misc_feature (13)..(13): 2'-O-methyl
  misc_feature (14)..(14): 2'-deoxy-2'-fluoro
  misc_feature (15)..(17): 2'-O-methyl
  misc_feature (18)..(19): 2'-deoxy-2'-fluoro
  misc_feature (20)..(21): internucleotide phosphorothioate linkage
cucaccgguuccgcagaccnn

SEQ ID NO: 1818 - RNA, 21 nt, Artificial Sequence
  Description of Artificial Sequence: siNA antisense
  misc_feature (1)..(1): 2'-O-methyl
  misc_feature (2)..(4): 2'-deoxy-2'-fluoro
  misc_feature (5)..(5): 2'-O-methyl
  misc_feature (6)..(7): 2'-deoxy-2'-fluoro
  misc_feature (8)..(9): 2'-O-methyl
  misc_feature (10)..(13): 2'-deoxy-2'-fluoro
  misc_feature (14)..(14): 2'-O-methyl
  misc_feature (15)..(15): 2'-deoxy-2'-fluoro
  misc_feature (16)..(18): 2'-O-methyl
  misc_feature (19)..(19): 2'-deoxy-2'-fluoro
  misc_feature (20)..(21): internucleotide phosphorothioate linkage
acucaccgguuccgcagacnn

SEQ ID NO: 1819 - RNA, 21 nt, Artificial Sequence
  Description of Artificial Sequence: siNA antisense
  misc_feature (1)..(1): 2'-deoxy-2'-fluoro
  misc_feature (2)..(2): 2'-O-methyl
  misc_feature (3)..(5): 2'-deoxy-2'-fluoro
  misc_feature (6)..(6): 2'-O-methyl
  misc_feature (7)..(8): 2'-deoxy-2'-fluoro
  misc_feature (9)..(10): 2'-O-methyl
  misc_feature (11)..(14): 2'-deoxy-2'-fluoro
  misc_feature (15)..(15): 2'-O-methyl
  misc_feature (16)..(16): 2'-deoxy-2'-fluoro
  misc_feature (17)..(19): 2'-O-methyl
  misc_feature (20)..(21): internucleotide phosphorothioate linkage
uacucaccgguuccgcagann

SEQ ID NO: 1820 - RNA, 21 nt, Artificial Sequence
  Description of Artificial Sequence: siNA antisense
  misc_feature (1)..(1): 2'-deoxy-2'-fluoro
  misc_feature (2)..(2): 2'-O-methyl
  misc_feature (3)..(3): 2'-deoxy-2'-fluoro
  misc_feature (4)..(4): 2'-O-methyl
  misc_feature (5)..(7): 2'-deoxy-2'-fluoro
  misc_feature (8)..(8): 2'-O-methyl
  misc_feature (9)..(10): 2'-deoxy-2'-fluoro
  misc_feature (11)..(12): 2'-O-methyl
  misc_feature (13)..(16): 2'-deoxy-2'-fluoro
  misc_feature (17)..(17): 2'-O-methyl
  misc_feature (18)..(18): 2'-deoxy-2'-fluoro
  misc_feature (19)..(19): 2'-O-methyl
  misc_feature (20)..(21): internucleotide phosphorothioate linkage
uguacucaccgguuccgcann

SEQ ID NO: 1821 - RNA, 21 nt, Artificial Sequence
  Description of Artificial Sequence: siNA antisense
  misc_feature (1)..(1): 2'-O-methyl
  misc_feature (2)..(2): 2'-deoxy-2'-fluoro
  misc_feature (3)..(3): 2'-O-methyl
  misc_feature (4)..(4): 2'-deoxy-2'-fluoro
  misc_feature (5)..(5): 2'-O-methyl
  misc_feature (6)..(8): 2'-deoxy-2'-fluoro
  misc_feature (9)..(9): 2'-O-methyl
  misc_feature (10)..(11): 2'-deoxy-2'-fluoro
  misc_feature (12)..(13): 2'-O-methyl
  misc_feature (14)..(17): 2'-deoxy-2'-fluoro
  misc_feature (18)..(18): 2'-O-methyl
  misc_feature (19)..(19): 2'-deoxy-2'-fluoro
  misc_feature (20)..(21): internucleotide phosphorothioate linkage
guguacucaccgguuccgcnn

SEQ ID NO: 1822 - RNA, 21 nt, Artificial Sequence
  Description of Artificial Sequence: siNA antisense
  misc_feature (1)..(2): 2'-deoxy-2'-fluoro
  misc_feature (3)..(4): 2'-O-methyl
  misc_feature (5)..(5): 2'-deoxy-2'-fluoro
  misc_feature (6)..(6): 2'-O-methyl
  misc_feature (7)..(7): 2'-deoxy-2'-fluoro
  misc_feature (8)..(8): 2'-O-methyl
  misc_feature (9)..(11): 2'-deoxy-2'-fluoro
  misc_feature (12)..(12): 2'-O-methyl
  misc_feature (13)..(14): 2'-deoxy-2'-fluoro
  misc_feature (15)..(16): 2'-O-methyl
  misc_feature (17)..(19): 2'-deoxy-2'-fluoro
  misc_feature (20)..(21): internucleotide phosphorothioate linkage
ccgguguacucaccgguucnn

SEQ ID NO: 1823 - RNA, 21 nt, Artificial Sequence
  Description of Artificial Sequence: siNA antisense
  misc_feature (1)..(3): 2'-deoxy-2'-fluoro
  misc_feature (4)..(5): 2'-O-methyl
  misc_feature (6)..(6): 2'-deoxy-2'-fluoro
  misc_feature (7)..(7): 2'-O-methyl
  misc_feature (8)..(8): 2'-deoxy-2'-fluoro
  misc_feature (9)..(9): 2'-O-methyl
  misc_feature (10)..(12): 2'-deoxy-2'-fluoro
  misc_feature (13)..(13): 2'-O-methyl
  misc_feature (14)..(15): 2'-deoxy-2'-fluoro
  misc_feature (16)..(17): 2'-O-methyl
  misc_feature (18)..(19): 2'-deoxy-2'-fluoro
  misc_feature (20)..(21): internucleotide phosphorothioate linkage
uccgguguacucaccgguunn

SEQ ID NO: 1824 - RNA, 21 nt, Artificial Sequence
  Description of Artificial Sequence: siNA antisense
  misc_feature (1)..(4): 2'-deoxy-2'-fluoro
  misc_feature (5)..(6): 2'-O-methyl
  misc_feature (7)..(7): 2'-deoxy-2'-fluoro
  misc_feature (8)..(8): 2'-O-methyl
  misc_feature (9)..(9): 2'-deoxy-2'-fluoro
  misc_feature (10)..(10): 2'-O-methyl
  misc_feature (11)..(13): 2'-deoxy-2'-fluoro
  misc_feature (14)..(14): 2'-O-methyl
  misc_feature (15)..(16): 2'-deoxy-2'-fluoro
  misc_feature (17)..(18): 2'-O-methyl
  misc_feature (19)..(19): 2'-deoxy-2'-fluoro
  misc_feature (20)..(21): internucleotide phosphorothioate linkage
uuccgguguacucaccggunn

SEQ ID NO: 1825 - RNA, 21 nt, Artificial Sequence
  Description of Artificial Sequence: siNA antisense
  misc_feature (1)..(1): 2'-O-methyl
  misc_feature (2)..(5): 2'-deoxy-2'-fluoro
  misc_feature (6)..(7): 2'-O-methyl
  misc_feature (8)..(8): 2'-deoxy-2'-fluoro
  misc_feature (9)..(9): 2'-O-methyl
  misc_feature (10)..(10): 2'-deoxy-2'-fluoro
  misc_feature (11)..(11): 2'-O-methyl
  misc_feature (12)..(14): 2'-deoxy-2'-fluoro
  misc_feature (15)..(15): 2'-O-methyl
  misc_feature (16)..(17): 2'-deoxy-2'-fluoro
  misc_feature (18)..(19): 2'-O-methyl
  misc_feature (20)..(21): internucleotide phosphorothioate linkage
auuccgguguacucaccggnn

SEQ ID NO: 1826 - RNA, 21 nt, Artificial Sequence
  Description of Artificial Sequence: siNA antisense
  misc_feature (1)..(1): 2'-O-methyl
  misc_feature (2)..(2): 2'-deoxy-2'-fluoro
  misc_feature (3)..(3): 2'-O-methyl
  misc_feature (4)..(5): 2'-deoxy-2'-fluoro
  misc_feature (6)..(6): 2'-O-methyl
  misc_feature (7)..(7): 2'-deoxy-2'-fluoro
  misc_feature (8)..(11): 2'-O-methyl
  misc_feature (12)..(17): 2'-deoxy-2'-fluoro
  misc_feature (18)..(18): 2'-O-methyl
  misc_feature (19)..(19): 2'-deoxy-2'-fluoro
  misc_feature (20)..(21): internucleotide phosphorothioate linkage
guaccacaaggccuuucgcnn

SEQ ID NO: 1827 - RNA, 21 nt, Artificial Sequence
  Description of Artificial Sequence: siNA antisense
  misc_feature (1)..(2): 2'-O-methyl
  misc_feature (3)..(3): 2'-deoxy-2'-fluoro
  misc_feature (4)..(4): 2'-O-methyl
  misc_feature (5)..(6): 2'-deoxy-2'-fluoro
  misc_feature (7)..(7): 2'-O-methyl
  misc_feature (8)..(8): 2'-deoxy-2'-fluoro
  misc_feature (9)..(12): 2'-O-methyl
  misc_feature (13)..(18): 2'-deoxy-2'-fluoro
  misc_feature (19)..(19): 2'-O-methyl
  misc_feature (20)..(21): internucleotide phosphorothioate linkage
aguaccacaaggccuuucgnn

SEQ ID NO: 1828 - RNA, 21 nt, Artificial Sequence
  Description of Artificial Sequence: siNA antisense
  misc_feature (1)..(1): 2'-deoxy-2'-fluoro
  misc_feature (2)..(3): 2'-O-methyl
  misc_feature (4)..(4): 2'-deoxy-2'-fluoro
  misc_feature (5)..(5): 2'-O-methyl
  misc_feature (6)..(7): 2'-deoxy-2'-fluoro
  misc_feature (8)..(8): 2'-O-methyl
  misc_feature (9)..(9): 2'-deoxy-2'-fluoro
  misc_feature (10)..(13): 2'-O-methyl
  misc_feature (14)..(19): 2'-deoxy-2'-fluoro
  misc_feature (20)..(21): internucleotide phosphorothioate linkage
caguaccacaaggccuuucnn

SEQ ID NO: 1829 - RNA, 21 nt, Artificial Sequence
  Description of Artificial Sequence: siNA antisense
  misc_feature (1)..(1): 2'-O-methyl
  misc_feature (2)..(2): 2'-deoxy-2'-fluoro
  misc_feature (3)..(4): 2'-O-methyl
  misc_feature (5)..(5): 2'-deoxy-2'-fluoro
  misc_feature (6)..(6): 2'-O-methyl
  misc_feature (7)..(8): 2'-deoxy-2'-fluoro
  misc_feature (9)..(9): 2'-O-methyl
  misc_feature (10)..(10): 2'-deoxy-2'-fluoro
  misc_feature (11)..(14): 2'-O-methyl
  misc_feature (15)..(19): 2'-deoxy-2'-fluoro
  misc_feature (20)..(21): internucleotide phosphorothioate linkage
gcaguaccacaaggccuuunn

SEQ ID NO: 1830 - RNA, 21 nt, Artificial Sequence
  Description of Artificial Sequence: siNA antisense
  misc_feature (1)..(2): 2'-O-methyl
  misc_feature (3)..(3): 2'-deoxy-2'-fluoro
  misc_feature (4)..(5): 2'-O-methyl
  misc_feature (6)..(6): 2'-deoxy-2'-fluoro
  misc_feature (7)..(7): 2'-O-methyl
  misc_feature (8)..(9): 2'-deoxy-2'-fluoro
  misc_feature (10)..(10): 2'-O-methyl
  misc_feature (11)..(11): 2'-deoxy-2'-fluoro
  misc_feature (12)..(15): 2'-O-methyl
  misc_feature (16)..(19): 2'-deoxy-2'-fluoro
  misc_feature (20)..(21): internucleotide phosphorothioate linkage
ggcaguaccacaaggccuunn

SEQ ID NO: 1831 - RNA, 21 nt, Artificial Sequence
  Description of Artificial Sequence: siNA antisense
  misc_feature (1)..(1): 2'-deoxy-2'-fluoro
  misc_feature (2)..(4): 2'-O-methyl
  misc_feature (5)..(5): 2'-deoxy-2'-fluoro
  misc_feature (6)..(7): 2'-O-methyl
  misc_feature (8)..(8): 2'-deoxy-2'-fluoro
  misc_feature (9)..(9): 2'-O-methyl
  misc_feature (10)..(11): 2'-deoxy-2'-fluoro
  misc_feature (12)..(12): 2'-O-methyl
  misc_feature (13)..(13): 2'-deoxy-2'-fluoro
  misc_feature (14)..(17): 2'-O-methyl
  misc_feature (18)..(19): 2'-deoxy-2'-fluoro
  misc_feature (20)..(21): internucleotide phosphorothioate linkage
caggcaguaccacaaggccnn

SEQ ID NO: 1832 - RNA, 21 nt, Artificial Sequence
  Description of Artificial Sequence: siNA antisense
  misc_feature (1)..(2): 2'-deoxy-2'-fluoro
  misc_feature (3)..(5): 2'-O-methyl
  misc_feature (6)..(6): 2'-deoxy-2'-fluoro
  misc_feature (7)..(8): 2'-O-methyl
  misc_feature (9)..(9): 2'-deoxy-2'-fluoro
  misc_feature (10)..(10): 2'-O-methyl
  misc_feature (11)..(12): 2'-deoxy-2'-fluoro
  misc_feature (13)..(13): 2'-O-methyl
  misc_feature (14)..(14): 2'-deoxy-2'-fluoro
  misc_feature (15)..(18): 2'-O-methyl
  misc_feature (19)..(19): 2'-deoxy-2'-fluoro
  misc_feature (20)..(21): internucleotide phosphorothioate linkage
ucaggcaguaccacaaggcnn

SEQ ID NO: 1833 - RNA, 21 nt, Artificial Sequence
  Description of Artificial Sequence: siNA antisense
  misc_feature (1)..(1): 2'-O-methyl
  misc_feature (2)..(3): 2'-deoxy-2'-fluoro
  misc_feature (4)..(6): 2'-O-methyl
  misc_feature (7)..(7): 2'-deoxy-2'-fluoro
  misc_feature (8)..(9): 2'-O-methyl
  misc_feature (10)..(10): 2'-deoxy-2'-fluoro
  misc_feature (11)..(11): 2'-O-methyl
  misc_feature (12)..(13): 2'-deoxy-2'-fluoro
  misc_feature (14)..(14): 2'-O-methyl
  misc_feature (15)..(15): 2'-deoxy-2'-fluoro
  misc_feature (16)..(19): 2'-O-methyl
  misc_feature (20)..(21): internucleotide phosphorothioate linkage
aucaggcaguaccacaaggnn

SEQ ID NO: 1834 - RNA, 21 nt, Artificial Sequence
  Description of Artificial Sequence: siNA antisense
  misc_feature (1)..(3): 2'-O-methyl
  misc_feature (4)..(4): 2'-deoxy-2'-fluoro
  misc_feature (5)..(5): 2'-O-methyl
  misc_feature (6)..(9): 2'-deoxy-2'-fluoro
  misc_feature (10)..(10): 2'-O-methyl
  misc_feature (11)..(12): 2'-deoxy-2'-fluoro
  misc_feature (13)..(15): 2'-O-methyl
  misc_feature (16)..(16): 2'-deoxy-2'-fluoro
  misc_feature (17)..(18): 2'-O-methyl
  misc_feature (19)..(19): 2'-deoxy-2'-fluoro
  misc_feature (20)..(21): internucleotide phosphorothioate linkage
aagcacccuaucaggcagunn

SEQ ID NO: 1835 - RNA, 21 nt, Artificial Sequence
  Description of Artificial Sequence: siNA antisense
  misc_feature (1)..(1): 2'-deoxy-2'-fluoro
  misc_feature (2)..(2): 2'-O-methyl
  misc_feature (3)..(3): 2'-deoxy-2'-fluoro
  misc_feature (4)..(6): 2'-O-methyl
  misc_feature (7)..(7): 2'-deoxy-2'-fluoro
  misc_feature (8)..(8): 2'-O-methyl
  misc_feature (9)..(12): 2'-deoxy-2'-fluoro
  misc_feature (13)..(13): 2'-O-methyl
  misc_feature (14)..(15): 2'-deoxy-2'-fluoro
  misc_feature (16)..(18): 2'-O-methyl
  misc_feature (19)..(19): 2'-deoxy-2'-fluoro
  misc_feature (20)..(21): internucleotide phosphorothioate linkage
cgcaagcacccuaucaggcnn

SEQ ID NO: 1836 - RNA, 21 nt, Artificial Sequence
  Description of Artificial Sequence: siNA antisense
  misc_feature (1)..(3): 2'-deoxy-2'-fluoro
  misc_feature (4)..(4): 2'-O-methyl
  misc_feature (5)..(5): 2'-deoxy-2'-fluoro
  misc_feature (6)..(8): 2'-O-methyl
  misc_feature (9)..(9): 2'-deoxy-2'-fluoro
  misc_feature (10)..(10): 2'-O-methyl
  misc_feature (11)..(14): 2'-deoxy-2'-fluoro
  misc_feature (15)..(15): 2'-O-methyl
  misc_feature (16)..(17): 2'-deoxy-2'-fluoro
  misc_feature (18)..(19): 2'-O-methyl
  misc_feature (20)..(21): internucleotide phosphorothioate linkage
cucgcaagcacccuaucagnn

SEQ ID NO: 1837 - RNA, 21 nt, Artificial Sequence
  Description of Artificial Sequence: siNA antisense
  misc_feature (1)..(1): 2'-O-methyl
  misc_feature (2)..(4): 2'-deoxy-2'-fluoro
  misc_feature (5)..(5): 2'-O-methyl
  misc_feature (6)..(6): 2'-deoxy-2'-fluoro
  misc_feature (7)..(9): 2'-O-methyl
  misc_feature (10)..(10): 2'-deoxy-2'-fluoro
  misc_feature (11)..(11): 2'-O-methyl
  misc_feature (12)..(15): 2'-deoxy-2'-fluoro
  misc_feature (16)..(16): 2'-O-methyl
  misc_feature (17)..(18): 2'-deoxy-2'-fluoro
  misc_feature (19)..(19): 2'-O-methyl
  misc_feature (20)..(21): internucleotide phosphorothioate linkage
acucgcaagcacccuaucann

SEQ ID NO: 1838 - RNA, 21 nt, Artificial Sequence
  Description of Artificial Sequence: siNA antisense
  misc_feature (1)..(1): 2'-O-methyl
  misc_feature (2)..(2): 2'-deoxy-2'-fluoro
  misc_feature (3)..(3): 2'-O-methyl
  misc_feature (4)..(6): 2'-deoxy-2'-fluoro
  misc_feature (7)..(7): 2'-O-methyl
  misc_feature (8)..(8): 2'-deoxy-2'-fluoro
  misc_feature (9)..(11): 2'-O-methyl
  misc_feature (12)..(12): 2'-deoxy-2'-fluoro
  misc_feature (13)..(13): 2'-O-methyl
  misc_feature (14)..(17): 2'-deoxy-2'-fluoro
  misc_feature (18)..(18): 2'-O-methyl
  misc_feature (19)..(19): 2'-deoxy-2'-fluoro
  misc_feature (20)..(21): internucleotide phosphorothioate linkage
gcacucgcaagcacccuaunn

SEQ ID NO: 1839 - RNA, 21 nt, Artificial Sequence
  Description of Artificial Sequence: siNA antisense
  misc_feature (1)..(2): 2'-O-methyl
  misc_feature (3)..(3): 2'-deoxy-2'-fluoro
  misc_feature (4)..(4): 2'-O-methyl
  misc_feature (5)..(7): 2'-deoxy-2'-fluoro
  misc_feature (8)..(8): 2'-O-methyl
  misc_feature (9)..(9): 2'-deoxy-2'-fluoro
  misc_feature (10)..(12): 2'-O-methyl
  misc_feature (13)..(13): 2'-deoxy-2'-fluoro
  misc_feature (14)..(14): 2'-O-methyl
  misc_feature (15)..(18): 2'-deoxy-2'-fluoro
  misc_feature (19)..(19): 2'-O-methyl
  misc_feature (20)..(21): internucleotide phosphorothioate linkage
ggcacucgcaagcacccuann

SEQ ID NO: 1840 - RNA, 21 nt, Artificial Sequence
  Description of Artificial Sequence: siNA antisense
  misc_feature (1)..(4): 2'-O-methyl
  misc_feature (5)..(5): 2'-deoxy-2'-fluoro
  misc_feature (6)..(6): 2'-O-methyl
  misc_feature (7)..(9): 2'-deoxy-2'-fluoro
  misc_feature (10)..(10): 2'-O-methyl
  misc_feature (11)..(11): 2'-deoxy-2'-fluoro
  misc_feature (12)..(14): 2'-O-methyl
  misc_feature (15)..(15): 2'-deoxy-2'-fluoro
  misc_feature (16)..(16): 2'-O-methyl
  misc_feature (17)..(19): 2'-deoxy-2'-fluoro
  misc_feature (20)..(21): internucleotide phosphorothioate linkage
ggggcacucgcaagcacccnn

SEQ ID NO: 1841 - RNA, 21 nt, Artificial Sequence
  Description of Artificial Sequence: siNA antisense
  misc_feature (1)..(1): 2'-deoxy-2'-fluoro
  misc_feature (2)..(5): 2'-O-methyl
  misc_feature (6)..(6): 2'-deoxy-2'-fluoro
  misc_feature (7)..(7): 2'-O-methyl
  misc_feature (8)..(10): 2'-deoxy-2'-fluoro
  misc_feature (11)..(11): 2'-O-methyl
  misc_feature (12)..(12): 2'-deoxy-2'-fluoro
  misc_feature (13)..(15): 2'-O-methyl
  misc_feature (16)..(16): 2'-deoxy-2'-fluoro
  misc_feature (17)..(17): 2'-O-methyl
  misc_feature (18)..(19): 2'-deoxy-2'-fluoro
  misc_feature (20)..(21): internucleotide phosphorothioate linkage
cggggcacucgcaagcaccnn

SEQ ID NO: 1842 - RNA, 21 nt, Artificial Sequence
  Description of Artificial Sequence: siNA antisense
  misc_feature (1)..(4): 2'-deoxy-2'-fluoro
  misc_feature (5)..(8): 2'-O-methyl
  misc_feature (9)..(9): 2'-deoxy-2'-fluoro
  misc_feature (10)..(10): 2'-O-methyl
  misc_feature (11)..(13): 2'-deoxy-2'-fluoro
  misc_feature (14)..(14): 2'-O-methyl
  misc_feature (15)..(15): 2'-deoxy-2'-fluoro
  misc_feature (16)..(18): 2'-O-methyl
  misc_feature (19)..(19): 2'-deoxy-2'-fluoro
  misc_feature (20)..(21): internucleotide phosphorothioate linkage
ucccggggcacucgcaagcnn

SEQ ID NO: 1843 - RNA, 21 nt, Artificial Sequence
  Description of Artificial Sequence: siNA antisense
  misc_feature (1)..(5): 2'-deoxy-2'-fluoro
  misc_feature (6)..(9): 2'-O-methyl
  misc_feature (10)..(10): 2'-deoxy-2'-fluoro
  misc_feature (11)..(11): 2'-O-methyl
  misc_feature (12)..(14): 2'-deoxy-2'-fluoro
  misc_feature (15)..(15): 2'-O-methyl
  misc_feature (16)..(16): 2'-deoxy-2'-fluoro
  misc_feature (17)..(19): 2'-O-methyl
  misc_feature (20)..(21): internucleotide phosphorothioate linkage
cucccggggcacucgcaagnn

SEQ ID NO: 1844 - RNA, 21 nt, Artificial Sequence
  Description of Artificial Sequence: siNA antisense
  misc_feature (1)..(6): 2'-deoxy-2'-fluoro
  misc_feature (7)..(10): 2'-O-methyl
  misc_feature (11)..(11): 2'-deoxy-2'-fluoro
  misc_feature (12)..(12): 2'-O-methyl
  misc_feature (13)..(15): 2'-deoxy-2'-fluoro
  misc_feature (16)..(16): 2'-O-methyl
  misc_feature (17)..(17): 2'-deoxy-2'-fluoro
  misc_feature (18)..(19): 2'-O-methyl
  misc_feature (20)..(21): internucleotide phosphorothioate linkage
ccucccggggcacucgcaann

SEQ ID NO: 1845 - RNA, 21 nt, Artificial Sequence
  Description of Artificial Sequence: siNA antisense
  misc_feature (1)..(1): 2'-O-methyl
  misc_feature (2)..(7): 2'-deoxy-2'-fluoro
  misc_feature (8)..(11): 2'-O-methyl
  misc_feature (12)..(12): 2'-deoxy-2'-fluoro
  misc_feature (13)..(13): 2'-O-methyl
  misc_feature (14)..(16): 2'-deoxy-2'-fluoro
  misc_feature (17)..(17): 2'-O-methyl
  misc_feature (18)..(18): 2'-deoxy-2'-fluoro
  misc_feature (19)..(19): 2'-O-methyl
  misc_feature (20)..(21): internucleotide phosphorothioate linkage
accucccggggcacucgcann

SEQ ID NO: 1846 - RNA, 21 nt, Artificial Sequence
  Description of Artificial Sequence: siNA antisense
  misc_feature (1)..(2): 2'-O-methyl
  misc_feature (3)..(8): 2'-deoxy-2'-fluoro
  misc_feature (9)..(12): 2'-O-methyl
  misc_feature (13)..(13): 2'-deoxy-2'-fluoro
  misc_feature (14)..(14): 2'-O-methyl
  misc_feature (18)..(18): 2'-O-methyl
  misc_feature (19)..(19): 2'-deoxy-2'-fluoro
  misc_feature (20)..(21): internucleotide phosphorothioate linkage
  misc_feature (26)..(28): 2'-deoxy-2'-fluoro
gaccucccggggcacucgcnn

SEQ ID NO: 1847 - RNA, 21 nt, Artificial Sequence
  Description of Artificial Sequence: siNA antisense
  misc_feature (1)..(3): 2'-O-methyl
  misc_feature (4)..(9): 2'-deoxy-2'-fluoro
  misc_feature (10)..(13): 2'-O-methyl
  misc_feature (14)..(14): 2'-deoxy-2'-fluoro
  misc_feature (15)..(15): 2'-O-methyl
  misc_feature (16)..(18): 2'-deoxy-2'-fluoro
  misc_feature (19)..(19): 2'-O-methyl
  misc_feature (20)..(21): internucleotide phosphorothioate linkage
agaccucccggggcacucgnn

SEQ ID NO: 1848 - RNA, 21 nt, Artificial Sequence
  Description of Artificial Sequence: siNA antisense
  misc_feature (1)..(4): 2'-O-methyl
  misc_feature (5)..(10): 2'-O-methyl
  misc_feature (11)..(14): 2'-O-methyl
  misc_feature (15)..(15): 2'-O-methyl
  misc_feature (16)..(16): 2'-O-methyl
  misc_feature (17)..(19): 2'-O-methyl
  misc_feature (20)..(21): internucleotide phosphorothioate linkage
gagaccucccggggcacucnn

SEQ ID NO: 1849 - RNA, 21 nt, Artificial Sequence
  Description of Artificial Sequence: siNA antisense
  misc_feature (1)..(1): 2'-O-methyl
  misc_feature (2)..(2): 2'-deoxy-2'-fluoro
  misc_feature (3)..(6): 2'-O-methyl
  misc_feature (7)..(12): 2'-deoxy-2'-fluoro
  misc_feature (13)..(16): 2'-O-methyl
  misc_feature (17)..(17): 2'-deoxy-2'-fluoro
  misc_feature (18)..(18): 2'-O-methyl
  misc_feature (19)..(19): 2'-deoxy-2'-fluoro
  misc_feature (20)..(21): internucleotide phosphorothioate linkage
acgagaccucccggggcacnn

SEQ ID NO: 1850 - RNA, 21 nt, Artificial Sequence
  Description of Artificial Sequence: siNA antisense
  misc_feature (1)..(1): 2'-deoxy-2'-fluoro
  misc_feature (2)..(2): 2'-O-methyl
  misc_feature (3)..(3): 2'-deoxy-2'-fluoro
  misc_feature (4)..(7): 2'-O-methyl
  misc_feature (8)..(13): 2'-deoxy-2'-fluoro
  misc_feature (14)..(17): 2'-O-methyl
  misc_feature (18)..(18): 2'-deoxy-2'-fluoro
  misc_feature (19)..(19): 2'-O-methyl
  misc_feature (20)..(21): internucleotide phosphorothioate linkage
uacgagaccucccggggcann

SEQ ID NO: 1851 - RNA, 21 nt, Artificial Sequence
  Description of Artificial Sequence: siNA antisense
  misc_feature (1)..(1): 2'-deoxy-2'-fluoro
  misc_feature (2)..(2): 2'-O-methyl
  misc_feature (3)..(3): 2'-deoxy-2'-fluoro
  misc_feature (4)..(5): 2'-O-methyl
  misc_feature (6)..(8): 2'-deoxy-2'-fluoro
  misc_feature (9)..(9): 2'-O-methyl
  misc_feature (10)..(10): 2'-deoxy-2'-fluoro
  misc_feature (11)..(14): 2'-O-methyl
  misc_feature (15)..(19): 2'-deoxy-2'-fluoro
  misc_feature (20)..(21): internucleotide phosphorothioate linkage
cacggucuacgagaccuccnn

SEQ ID NO: 1852 - RNA, 21 nt, Artificial Sequence
  Description of Artificial Sequence: siNA antisense
  misc_feature (1)..(1): terminal phosphate group
  misc_feature (1)..(2): 2'-deoxy-2'-fluoro
  misc_feature (3)..(3): 2'-O-methyl
  misc_feature (4)..(4): 2'-deoxy-2'-fluoro
  misc_feature (5)..(7): 2'-O-methyl
  misc_feature (8)..(8): 2'-deoxy-2'-fluoro
  misc_feature (9)..(9): 2'-O-methyl
  misc_feature (10)..(13): 2'-deoxy-2'-fluoro
  misc_feature (14)..(14): 2'-O-methyl
  misc_feature (15)..(16): 2'-deoxy-2'-fluoro
  misc_feature (17)..(19): 2'-O-methyl
  misc_feature (20)..(21): internucleotide phosphorothioate linkage
ucgcaagcacccuaucaggnn

SEQ ID NO: 1853 - RNA, 21 nt, Artificial Sequence
  Description of Artificial Sequence: siNA antisense
  misc_feature (1)..(1): terminal phosphate group
  misc_feature (1)..(2): 2'-deoxy-2'-fluoro
  misc_feature (4)..(4): 2'-deoxy-2'-fluoro
  misc_feature (8)..(8): 2'-deoxy-2'-fluoro
  misc_feature (10)..(13): 2'-deoxy-2'-fluoro
  misc_feature (15)..(16): 2'-deoxy-2'-fluoro
  misc_feature (20)..(21): internucleotide phosphorothioate linkage
ucgcaagcacccuaucaggnn

SEQ ID NO: 1854 - RNA, 21 nt, Artificial Sequence
  Description of Artificial Sequence: siNA antisense
  misc_feature (1)..(1): terminal phosphate group
  misc_feature (2)..(5): 2'-deoxy-2'-fluoro
  misc_feature (7)..(8): 2'-deoxy-2'-fluoro
  misc_feature (12)..(12): 2'-deoxy-2'-fluoro
  misc_feature (15)..(15): 2'-deoxy-2'-fluoro
  misc_feature (17)..(18): 2'-deoxy-2'-fluoro
  misc_feature (20)..(21): internucleotide phosphorothioate linkage
acccuaucaggcaguaccann

SEQ ID NO: 1855 - RNA, 21 nt, Artificial Sequence
  Description of Artificial Sequence: siNA antisense
  misc_feature (1)..(1): terminal phosphate group
  misc_feature (1)..(1): 2'-O-methyl
  misc_feature (2)..(5): 2'-deoxy-2'-fluoro
  misc_feature (6)..(6): 2'-O-methyl
  misc_feature (7)..(8): 2'-deoxy-2'-fluoro
  misc_feature (9)..(11): 2'-O-methyl
  misc_feature (12)..(12): 2'-deoxy-2'-fluoro
  misc_feature (13)..(14): 2'-O-methyl
  misc_feature (15)..(15): 2'-deoxy-2'-fluoro
  misc_feature (16)..(16): 2'-O-methyl
  misc_feature (17)..(18): 2'-deoxy-2'-fluoro
  misc_feature (19)..(19): 2'-O-methyl
  misc_feature (20)..(21): internucleotide phosphorothioate linkage
acccuaucaggcaguaccann

SEQ ID NO: 1856 - RNA, 21 nt, Artificial Sequence
  Description of Artificial Sequence: siNA antisense
  misc_feature (1)..(1): terminal phosphate group
  misc_feature (1)..(1): 2'-deoxy-2'-fluoro
  misc_feature (2)..(2): 2'-O-methyl
  misc_feature (3)..(5): 2'-deoxy-2'-fluoro
  misc_feature (6)..(6): 2'-O-methyl
  misc_feature (7)..(7): 2'-deoxy-2'-fluoro
  misc_feature (8)..(10): 2'-O-methyl
  misc_feature (11)..(11): 2'-deoxy-2'-fluoro
  misc_feature (12)..(12): 2'-O-methyl
  misc_feature (13)..(16): 2'-deoxy-2'-fluoro
  misc_feature (17)..(17): 2'-O-methyl
  misc_feature (18)..(19): 2'-deoxy-2'-fluoro
  misc_feature (20)..(21): internucleotide phosphorothioate linkage
cacucgcaagcacccuaucnn

SEQ ID NO: 1857 - RNA, 21 nt, Artificial Sequence
  Description of Artificial Sequence: siNA antisense
  misc_feature (1)..(1): terminal phosphate group
  misc_feature (1)..(2): 2'-O-methyl
  misc_feature (3)..(5): 2'-deoxy-2'-fluoro
  misc_feature (6)..(6): 2'-O-methyl
  misc_feature (7)..(7): 2'-deoxy-2'-fluoro
  misc_feature (8)..(11): 2'-O-methyl
  misc_feature (12)..(17): 2'-deoxy-2'-fluoro
  misc_feature (18)..(19): 2'-O-methyl
  misc_feature (20)..(21): internucleotide phosphorothioate linkage
ggucuacgagaccucccggnn

SEQ ID NO: 1858 - RNA, 21 nt, Artificial Sequence
  Description of Artificial Sequence: siNA antisense
  misc_feature (1)..(1): terminal hexethelyne glycol
  misc_feature (1)..(2): 2'-deoxy-2'-fluoro
  misc_feature (3)..(3): 2'-O-methyl
  misc_feature (4)..(4): 2'-deoxy-2'-fluoro
  misc_feature (5)..(7): 2'-O-methyl
  misc_feature (8)..(8): 2'-deoxy-2'-fluoro
  misc_feature (9)..(9): 2'-O-methyl
  misc_feature (10)..(13): 2'-deoxy-2'-fluoro
  misc_feature (14)..(14): 2'-O-methyl
  misc_feature (15)..(16): 2'-deoxy-2'-fluoro
  misc_feature (17)..(19): 2'-O-methyl
  misc_feature (20)..(21): internucleotide phosphorothioate linkage
ucgcaagcacccuaucaggnn

SEQ ID NO: 1859 - RNA, 21 nt, Artificial Sequence
  Description of Artificial Sequence: siNA antisense
  misc_feature (1)..(1): terminal hexethelyne glycol
  misc_feature (1)..(2): 2'-deoxy-2'-fluoro
  misc_feature (4)..(4): 2'-deoxy-2'-fluoro
  misc_feature (8)..(8): 2'-deoxy-2'-fluoro
  misc_feature (10)..(13): 2'-deoxy-2'-fluoro
  misc_feature (15)..(16): 2'-deoxy-2'-fluoro
  misc_feature (20)..(21): internucleotide phosphorothioate linkage
ucgcaagcacccuaucaggnn

SEQ ID NO: 1860 - RNA, 21 nt, Artificial Sequence
  Description of Artificial Sequence: siNA antisense
  misc_feature (1)..(1): terminal hexethelyne glycol
  misc_feature (2)..(5): 2'-deoxy-2'-fluoro
  misc_feature (7)..(8): 2'-deoxy-2'-fluoro
  misc_feature (12)..(12): 2'-deoxy-2'-fluoro
  misc_feature (15)..(15): 2'-deoxy-2'-fluoro
  misc_feature (17)..(18): 2'-deoxy-2'-fluoro
  misc_feature (20)..(21): internucleotide phosphorothioate linkage
acccuaucaggcaguaccann

SEQ ID NO: 1861 - RNA, 21 nt, Artificial Sequence
  Description of Artificial Sequence: siNA antisense
  misc_feature (1)..(1): terminal hexethelyne glycol
  misc_feature (1)..(1): 2'-O-methyl
  misc_feature (2)..(5): 2'-deoxy-2'-fluoro
  misc_feature (6)..(6): 2'-O-methyl
  misc_feature (7)..(8): 2'-deoxy-2'-fluoro
  misc_feature (9)..(11): 2'-O-methyl
  misc_feature (12)..(12): 2'-deoxy-2'-fluoro
  misc_feature (13)..(14): 2'-O-methyl
  misc_feature (15)..(15): 2'-deoxy-2'-fluoro
  misc_feature (16)..(16): 2'-O-methyl
  misc_feature (17)..(18): 2'-deoxy-2'-fluoro
  misc_feature (19)..(19): 2'-O-methyl
  misc_feature (20)..(21): internucleotide phosphorothioate linkage
acccuaucaggcaguaccann

SEQ ID NO: 1862 - RNA, 21 nt, Artificial Sequence
  Description of Artificial Sequence: siNA antisense
  misc_feature (1)..(1): terminal hexethelyne glycol
  misc_feature (1)..(1): 2'-deoxy-2'-fluoro
  misc_feature (2)..(2): 2'-O-methyl
  misc_feature (3)..(5): 2'-deoxy-2'-fluoro
  misc_feature (6)..(6): 2'-O-methyl
  misc_feature (7)..(7): 2'-deoxy-2'-fluoro
  misc_feature (8)..(10): 2'-O-methyl
  misc_feature (11)..(11): 2'-deoxy-2'-fluoro
  misc_feature (12)..(12): 2'-O-methyl
  misc_feature (13)..(16): 2'-deoxy-2'-fluoro
  misc_feature (17)..(17): 2'-O-methyl
  misc_feature (18)..(19): 2'-deoxy-2'-fluoro
  misc_feature (20)..(21): internucleotide phosphorothioate linkage
cacucgcaagcacccuaucnn

SEQ ID NO: 1863 - RNA, 21 nt, Artificial Sequence
  Description of Artificial Sequence: siNA antisense
  misc_feature (1)..(1): terminal hexethelyne glycol
  misc_feature (1)..(2): 2'-O-methyl
  misc_feature (3)..(5): 2'-deoxy-2'-fluoro
  misc_feature (6)..(6): 2'-O-methyl
  misc_feature (7)..(7): 2'-deoxy-2'-fluoro
  misc_feature (8)..(11): 2'-O-methyl
  misc_feature (12)..(17): 2'-deoxy-2'-fluoro
  misc_feature (18)..(19): 2'-O-methyl
  misc_feature (20)..(21): internucleotide phosphorothioate linkage
ggucuacgagaccucccggnn

SEQ ID NO: 1864 - RNA, 21 nt, Artificial Sequence
  Description of Artificial Sequence: siNA sense
  misc_feature (1)..(1): 5'-3 attached terminal deoxyabasic moiety
  misc_feature (1)..(2): 2'-deoxy-2'-fluoro
  misc_feature (9)..(10): 2'-deoxy-2'-fluoro
  misc_feature (12)..(12): 2'-deoxy-2'-fluoro
  misc_feature (14)..(14): 2'-deoxy-2'-fluoro
  misc_feature (17)..(19): 2'-deoxy-2'-fluoro
  misc_feature (20)..(20): n is thymidine
  misc_feature (21)..(21): 3'-3 attached terminal deoxyabasic moiety
ccgagaggucgcguaguccnn

SEQ ID NO: 1865 - RNA, 21 nt, Artificial Sequence
  Description of Artificial Sequence: siNA sense
  misc_feature (1)..(1): 5'-3 attached terminal deoxyabasic moiety
  misc_feature (1)..(2): 2'-deoxy-2'-fluoro
  misc_feature (9)..(10): 2'-deoxy-2'-fluoro
  misc_feature (12)..(12): 2'-deoxy-2'-fluoro
  misc_feature (14)..(15): 2'-deoxy-2'-fluoro
  misc_feature (18)..(19): 2'-deoxy-2'-fluoro
  misc_feature (20)..(20): n is thymidine
  misc_feature (21)..(21): 3'-3 attached terminal deoxyabasic moiety
ccgagaggucgcgucgaucnn

SEQ ID NO: 1866 - RNA, 21 nt, Artificial Sequence
  Description of Artificial Sequence: siNA sense
  misc_feature (1)..(1): 5'-3 attached terminal deoxyabasic moiety
  misc_feature (1)..(2): 2'-deoxy-2'-fluoro
  misc_feature (5)..(5): 2'-deoxy-2'-fluoro
  misc_feature (9)..(12): 2'-deoxy-2'-fluoro
  misc_feature (14)..(14): 2'-deoxy-2'-fluoro
  misc_feature (18)..(18): 2'-deoxy-2'-fluoro
  misc_feature (20)..(20): n is thymidine
  misc_feature (21)..(21): 3'-3 attached terminal deoxyabasic moiety
ccgguaggucccguggacann

SEQ ID NO: 1867 - RNA, 21 nt, Artificial Sequence
  Description of Artificial Sequence: siNA antisense
  misc_feature (1)..(3): 2'-O-methyl
  misc_feature (4)..(5): 2'-deoxy-2'-fluoro
  misc_feature (6)..(6): 2'-O-methyl
  misc_feature (7)..(7): 2'-deoxy-2'-fluoro
  misc_feature (8)..(8): 2'-O-methyl
  misc_feature (9)..(9): 2'-deoxy-2'-fluoro
  misc_feature (10)..(11): 2'-O-methyl
  misc_feature (12)..(17): 2'-deoxy-2'-fluoro
  misc_feature (18)..(19): 2'-O-methyl
  misc_feature (20)..(21): internucleotide phosphorothioate linkage
ggacuacgcgaccucucggnn

SEQ ID NO: 1868 - RNA, 21 nt, Artificial Sequence
  Description of Artificial Sequence: siNA antisense
  misc_feature (1)..(2): 2'-O-methyl
  misc_feature (3)..(4): 2'-deoxy-2'-fluoro
  misc_feature (5)..(6): 2'-O-methyl
  misc_feature (7)..(7): 2'-deoxy-2'-fluoro
  misc_feature (8)..(8): 2'-O-methyl
  misc_feature (9)..(9): 2'-deoxy-2'-fluoro
  misc_feature (10)..(11): 2'-O-methyl
  misc_feature (12)..(17): 2'-deoxy-2'-fluoro
  misc_feature (18)..(19): 2'-O-methyl
  misc_feature (20)..(21): internucleotide phosphorothioate linkage
gaucgacgcgaccucucggnn

SEQ ID NO: 1869 - RNA, 21 nt, Artificial Sequence
  Description of Artificial Sequence: siNA antisense
  misc_feature (1)..(1): 2'-deoxy-2'-fluoro
  misc_feature (2)..(2): 2'-O-methyl
  misc_feature (3)..(5): 2'-deoxy-2'-fluoro
  misc_feature (6)..(6): 2'-O-methyl
  misc_feature (7)..(7): 2'-deoxy-2'-fluoro
  misc_feature (8)..(11): 2'-O-methyl
  misc_feature (12)..(14): 2'-deoxy-2'-fluoro
  misc_feature (15)..(15): 2'-O-methyl
  misc_feature (16)..(17): 2'-deoxy-2'-fluoro
  misc_feature (18)..(19): 2'-O-methyl
  misc_feature (20)..(21): internucleotide phosphorothioate linkage
uguccacgggaccuaccggnn

SEQ ID NO: 1870 - RNA, 21 nt, Artificial Sequence
  Description of Artificial Sequence: siNA sense
  misc_feature (1)..(1): 5'-3 attached terminal deoxyabasic moiety
  misc_feature (1)..(1): 2'-deoxy
  misc_feature (2)..(3): 2'-deoxy-2'-fluoro
  misc_feature (4)..(8): 2'-deoxy
  misc_feature (9)..(9): 2'-deoxy-2'-fluoro
  misc_feature (10)..(10): 2'-deoxy
  misc_feature (11)..(12): 2'-deoxy-2'-fluoro
  misc_feature (13)..(13): 2'-deoxy
  misc_feature (14)..(14): 2'-deoxy-2'-fluoro
  misc_feature (15)..(16): 2'-deoxy
  misc_feature (17)..(17): 2'-deoxy-2'-fluoro
  misc_feature (18)..(18): 2'-deoxy
  misc_feature (19)..(19): 2'-deoxy-2'-fluoro
  misc_feature (20)..(20): n is thymidine
  misc_feature (21)..(21): 3'-3 attached terminal deoxyabasic moiety
gcuaaaggcguuguggcacnn

SEQ ID NO: 1871 - RNA, 21 nt, Artificial Sequence
  Description of Artificial Sequence: siNA sense
  misc_feature (1)..(1): 5'-3 attached terminal deoxyabasic moiety
  misc_feature (1)..(1): 2'-deoxy
  misc_feature (2)..(2): 2'-deoxy-2'-fluoro
  misc_feature (3)..(3): 2'-deoxy
  misc_feature (4)..(4): 2'-deoxy-2'-fluoro
  misc_feature (5)..(8): 2'-deoxy
  misc_feature (9)..(12): 2'-deoxy-2'-fluoro
  misc_feature (13)..(13): 2'-deoxy
  misc_feature (14)..(14): 2'-deoxy-2'-fluoro
  misc_feature (15)..(16): 2'-deoxy
  misc_feature (17)..(17): 2'-deoxy-2'-fluoro
  misc_feature (18)..(19): 2'-deoxy
  misc_feature (20)..(20): n is thymidine
  misc_feature (21)..(21): 3'-3 attached terminal deoxyabasic moiety
gcguaaggcccugugguaann

SEQ ID NO: 1872 - RNA, 21 nt, Artificial Sequence
  Description of Artificial Sequence: siNA sense
  misc_feature (1)..(1): 5'-3 attached terminal deoxyabasic moiety
  misc_feature (1)..(6): 2'-deoxy
  misc_feature (7)..(7): 2'-deoxy-2'-fluoro
  misc_feature (8)..(8): 2'-deoxy
  misc_feature (9)..(11): 2'-deoxy-2'-fluoro
  misc_feature (12)..(13): 2'-deoxy
  misc_feature (14)..(14): 2'-deoxy-2'-fluoro
  misc_feature (15)..(16): 2'-deoxy
  misc_feature (17)..(19): 2'-deoxy-2'-fluoro
  misc_feature (20)..(20): n is thymidine
  misc_feature (21)..(21): 3'-3 attached terminal deoxyabasic moiety
gagaaacgccuggugguucnn

SEQ ID NO: 1873 - RNA, 21 nt, Artificial Sequence
  Description of Artificial Sequence: siNA sense
  misc_feature (1)..(1): 5'-3 attached terminal deoxyabasic moiety
  misc_feature (1)..(1): 2'-deoxy-2'-fluoro
  misc_feature (2)..(2): 2'-deoxy
  misc_feature (3)..(3): 2'-deoxy-2'-fluoro
  misc_feature (4)..(7): 2'-deoxy
  misc_feature (8)..(8): 2'-deoxy-2'-fluoro
  misc_feature (9)..(9): 2'-deoxy
  misc_feature (10)..(11): 2'-deoxy-2'-fluoro
  misc_feature (12)..(12): 2'-deoxy
  misc_feature (13)..(13): 2'-deoxy-2'-fluoro
  misc_feature (14)..(15): 2'-deoxy
  misc_feature (16)..(16): 2'-deoxy-2'-fluoro
  misc_feature (17)..(17): 2'-deoxy
  misc_feature (18)..(19): 2'-deoxy-2'-fluoro
  misc_feature (20)..(20): n is thymidine
  misc_feature (21)..(21): 3'-3 attached terminal deoxyabasic moiety
cguaaggcauuguggcacunn

SEQ ID NO: 1874 - RNA, 21 nt, Artificial Sequence
  Description of Artificial Sequence: siNA sense
  misc_feature (1)..(1): 5'-3 attached terminal deoxyabasic moiety
  misc_feature (1)..(1): 2'-deoxy-2'-fluoro
  misc_feature (2)..(7): 2'-deoxy
  misc_feature (8)..(8): 2'-deoxy-2'-fluoro
  misc_feature (9)..(9): 2'-deoxy
  misc_feature (10)..(11): 2'-deoxy-2'-fluoro
  misc_feature (12)..(12): 2'-deoxy
  misc_feature (13)..(13): 2'-deoxy-2'-fluoro
  misc_feature (14)..(14): 2'-deoxy
  misc_feature (15)..(16): 2'-deoxy-2'-fluoro
  misc_feature (17)..(17): 2'-deoxy
  misc_feature (18)..(19): 2'-deoxy-2'-fluoro
  misc_feature (20)..(20): n is thymidine
  misc_feature (21)..(21): 3'-3 attached terminal deoxyabasic moiety
cgagaggcauugugcuacunn

SEQ ID NO: 1875 - RNA, 21 nt, Artificial Sequence
  Description of Artificial Sequence: siNA sense
  misc_feature (1)..(1): 5'-3 attached terminal deoxyabasic moiety
  misc_feature (1)..(2): 2'-deoxy-2'-fluoro
  misc_feature (3)..(7): 2'-deoxy
  misc_feature (8)..(11): 2'-deoxy-2'-fluoro
  misc_feature (12)..(15): 2'-deoxy
  misc_feature (16)..(16): 2'-deoxy-2'-fluoro
  misc_feature (17)..(17): 2'-deoxy
  misc_feature (18)..(19): 2'-deoxy-2'-fluoro
  misc_feature (20)..(20): n is thymidine
  misc_feature (21)..(21): 3'-3 attached terminal deoxyabasic moiety
ccaaaggucuugaggugcunn

SEQ ID NO: 1876 - RNA, 21 nt, Artificial Sequence
  Description of Artificial Sequence: siNA sense
  misc_feature (1)..(1): 5'-3 attached terminal deoxyabasic moiety
  misc_feature (1)..(1): 2'-deoxy-2'-fluoro
  misc_feature (2)..(4): 2'-deoxy
  misc_feature (5)..(5): 2'-deoxy-2'-fluoro
  misc_feature (6)..(8): 2'-deoxy
  misc_feature (9)..(10): 2'-deoxy-2'-fluoro
  misc_feature (11)..(11): 2'-deoxy
  misc_feature (12)..(14): 2'-deoxy-2'-fluoro
  misc_feature (15)..(15): 2'-deoxy
  misc_feature (16)..(16): 2'-deoxy-2'-fluoro
  misc_feature (17)..(19): 2'-deoxy
  misc_feature (20)..(20): n is thymidine
  misc_feature (21)..(21): 3'-3 attached terminal deoxyabasic moiety
cggauaggcugcuugugagnn

SEQ ID NO: 1877 - RNA, 21 nt, Artificial Sequence
  Description of Artificial Sequence: siNA sense
  misc_feature (1)..(1): 5'-3 attached terminal deoxyabasic moiety
  misc_feature (1)..(2): 2'-deoxy-2'-fluoro
  misc_feature (3)..(3): 2'-deoxy
  misc_feature (4)..(5): 2'-deoxy-2'-fluoro
  misc_feature (6)..(9): 2'-deoxy
  misc_feature (10)..(10): 2'-deoxy-2'-fluoro
  misc_feature (11)..(11): 2'-deoxy
  misc_feature (12)..(14): 2'-deoxy-2'-fluoro
  misc_feature (15)..(19): 2'-deoxy
  misc_feature (20)..(20): n is thymidine
  misc_feature (21)..(21): 3'-3 attached terminal deoxyabasic moiety
cugcuaggguacuugggagnn

SEQ ID NO: 1878 - RNA, 21 nt, Artificial Sequence
  Description of Artificial Sequence: siNA sense
  misc_feature (1)..(1): 5'-3 attached terminal deoxyabasic moiety
  misc_feature (1)..(2): 2'-deoxy-2'-fluoro
  misc_feature (3)..(4): 2'-deoxy
  misc_feature (5)..(5): 2'-deoxy-2'-fluoro
  misc_feature (6)..(6): 2'-deoxy
  misc_feature (7)..(7): 2'-deoxy-2'-fluoro
  misc_feature (8)..(9): 2'-deoxy
  misc_feature (10)..(10): 2'-deoxy-2'-fluoro
  misc_feature (11)..(12): 2'-deoxy
  misc_feature (13)..(14): 2'-deoxy-2'-fluoro
  misc_feature (15)..(15): 2'-deoxy
  misc_feature (16)..(16): 2'-deoxy-2'-fluoro
  misc_feature (17)..(19): 2'-deoxy
  misc_feature (20)..(20): n is thymidine
  misc_feature (21)..(21): 3'-3 attached terminal deoxyabasic moiety
ccgauauggugauugcgggnn

SEQ ID NO: 1879 - RNA, 21 nt, Artificial Sequence
  Description of Artificial Sequence: siNA sense
  misc_feature (1)..(1): 5'-3 attached terminal deoxyabasic moiety
  misc_feature (1)..(1): 2'-deoxy
  misc_feature (2)..(3): 2'-deoxy-2'-fluoro
  misc_feature (4)..(6): 2'-deoxy
  misc_feature (7)..(7): 2'-deoxy-2'-fluoro
  misc_feature (8)..(8): 2'-deoxy
  misc_feature (9)..(10): 2'-deoxy-2'-fluoro
  misc_feature (11)..(12): 2'-deoxy
  misc_feature (13)..(13): 2'-deoxy-2'-fluoro
  misc_feature (14)..(16): 2'-deoxy
  misc_feature (17)..(17): 2'-deoxy-2'-fluoro
  misc_feature (18)..(18): 2'-deoxy
  misc_feature (19)..(19): 2'-deoxy-2'-fluoro
  misc_feature (20)..(20): n is thymidine
  misc_feature (21)..(21): 3'-3 attached terminal deoxyabasic moiety
auugggugcuggcgaguacnn

SEQ ID NO: 1880 - RNA, 21 nt, Artificial Sequence
  Description of Artificial Sequence: siNA sense
  misc_feature (1)..(1): 5'-3 attached terminal deoxyabasic moiety
  misc_feature (1)..(1): 2'-deoxy
  misc_feature (2)..(2): 2'-deoxy-2'-fluoro
  misc_feature (3)..(3): 2'-deoxy
  misc_feature (4)..(4): 2'-deoxy-2'-fluoro
  misc_feature (5)..(6): 2'-deoxy
  misc_feature (7)..(7): 2'-deoxy-2'-fluoro
  misc_feature (8)..(8): 2'-deoxy
  misc_feature (9)..(11): 2'-deoxy-2'-fluoro
  misc_feature (12)..(12): 2'-deoxy
  misc_feature (13)..(13): 2'-deoxy-2'-fluoro
  misc_feature (14)..(16): 2'-deoxy
  misc_feature (17)..(17): 2'-deoxy-2'-fluoro
  misc_feature (18)..(19): 2'-deoxy
  misc_feature (20)..(20): n is thymidine
  misc_feature (21)..(21): 3'-3 attached terminal deoxyabasic moiety
auauggugccugcgaguggnn

SEQ ID NO: 1881 - RNA, 21 nt, Artificial Sequence
  Description of Artificial Sequence: siNA sense
  misc_feature (1)..(1): 5'-3 attached terminal deoxyabasic moiety
  misc_feature (1)..(6): 2'-deoxy
  misc_feature (7)..(7): 2'-deoxy-2'-fluoro
  misc_feature (8)..(8): 2'-deoxy
  misc_feature (9)..(11): 2'-deoxy-2'-fluoro
  misc_feature (12)..(12): 2'-deoxy
  misc_feature (13)..(13): 2'-deoxy-2'-fluoro
  misc_feature (14)..(14): 2'-deoxy
  misc_feature (15)..(15): 2'-deoxy-2'-fluoro
  misc_feature (16)..(16): 2'-deoxy
  misc_feature (17)..(17): 2'-deoxy-2'-fluoro
  misc_feature (18)..(18): 2'-deoxy
  misc_feature (19)..(19): 2'-deoxy-2'-fluoro
  misc_feature (20)..(20): n is thymidine
  misc_feature (21)..(21): 3'-3 attached terminal deoxyabasic moiety
agaggguacuugcgcgugunn

SEQ ID NO: 1882 - RNA, 21 nt, Artificial Sequence
  Description of Artificial Sequence: siNA antisense
  misc_feature (1)..(1): 2'-O-methyl
  misc_feature (2)..(2): 2'-deoxy-2'-fluoro
  misc_feature (3)..(3): 2'-O-methyl
  misc_feature (4)..(5): 2'-deoxy-2'-fluoro
  misc_feature (6)..(6): 2'-O-methyl
  misc_feature (7)..(7): 2'-deoxy-2'-fluoro
  misc_feature (8)..(9): 2'-O-methyl
  misc_feature (10)..(10): 2'-deoxy-2'-fluoro
  misc_feature (11)..(11): 2'-O-methyl
  misc_feature (12)..(16): 2'-deoxy-2'-fluoro
  misc_feature (17)..(18): 2'-O-methyl
  misc_feature (19)..(19): 2'-deoxy-2'-fluoro
  misc_feature (20)..(21): internucleotide phosphorothioate linkage
gugccacaacgccuuuagcnn

SEQ ID NO: 1883 - RNA, 21 nt, Artificial Sequence
  Description of Artificial Sequence: siNA antisense
  misc_feature (1)..(2): 2'-deoxy-2'-fluoro
  misc_feature (3)..(3): 2'-O-methyl
  misc_feature (4)..(5): 2'-deoxy-2'-fluoro
  misc_feature (6)..(6): 2'-O-methyl
  misc_feature (7)..(7): 2'-deoxy-2'-fluoro
  misc_feature (8)..(11): 2'-O-methyl
  misc_feature (12)..(15): 2'-deoxy-2'-fluoro
  misc_feature (16)..(16): 2'-O-methyl
  misc_feature (17)..(17): 2'-deoxy-2'-fluoro
  misc_feature (18)..(18): 2'-O-methyl
  misc_feature (19)..(19): 2'-deoxy-2'-fluoro
  misc_feature (20)..(21): internucleotide phosphorothioate linkage
uuaccacagggccuuacgcnn

SEQ ID NO: 1884 - RNA, 21 nt, Artificial Sequence
  Description of Artificial Sequence: siNA antisense
  misc_feature (1)..(3): 2'-O-methyl
  misc_feature (4)..(5): 2'-deoxy-2'-fluoro
  misc_feature (6)..(6): 2'-O-methyl
  misc_feature (7)..(8): 2'-deoxy-2'-fluoro
  misc_feature (9)..(11): 2'-O-methyl
  misc_feature (12)..(12): 2'-deoxy-2'-fluoro
  misc_feature (13)..(13): 2'-O-methyl
  misc_feature (14)..(19): 2'-deoxy-2'-fluoro
  misc_feature (20)..(21): internucleotide phosphorothioate linkage
gaaccaccaggcguuucucnn

SEQ ID NO: 1885 - RNA, 21 nt, Artificial Sequence
  Description of Artificial Sequence: siNA antisense
  misc_feature (1)..(2): 2'-O-methyl
  misc_feature (3)..(3): 2'-deoxy-2'-fluoro
  misc_feature (4)..(4): 2'-O-methyl
  misc_feature (5)..(6): 2'-deoxy-2'-fluoro
  misc_feature (7)..(7): 2'-O-methyl
  misc_feature (8)..(8): 2'-deoxy-2'-fluoro
  misc_feature (9)..(10): 2'-O-methyl
  misc_feature (11)..(11): 2'-deoxy-2'-fluoro
  misc_feature (12)..(12): 2'-O-methyl
  misc_feature (13)..(16): 2'-deoxy-2'-fluoro
  misc_feature (17)..(17): 2'-O-methyl
  misc_feature (18)..(18): 2'-deoxy-2'-fluoro
  misc_feature (19)..(19): 2'-O-methyl
  misc_feature (20)..(21): internucleotide phosphorothioate linkage
agugccacaaugccuuacgnn

SEQ ID NO: 1886 - RNA, 21 nt, Artificial Sequence
  Description of Artificial Sequence: siNA antisense
  misc_feature (1)..(2): 2'-O-methyl
  misc_feature (3)..(3): 2'-deoxy-2'-fluoro
  misc_feature (4)..(5): 2'-O-methyl
  misc_feature (6)..(6): 2'-deoxy-2'-fluoro
  misc_feature (7)..(7): 2'-O-methyl
  misc_feature (8)..(8): 2'-deoxy-2'-fluoro
  misc_feature (9)..(10): 2'-O-methyl
  misc_feature (11)..(11): 2'-deoxy-2'-fluoro
  misc_feature (12)..(12): 2'-O-methyl
  misc_feature (13)..(18): 2'-deoxy-2'-fluoro
  misc_feature (19)..(19): 2'-O-methyl
  misc_feature (20)..(21): internucleotide phosphorothioate linkage
aguagcacaaugccucucgnn

SEQ ID NO: 1887 - RNA, 21 nt, Artificial Sequence
  Description of Artificial Sequence: siNA antisense
  misc_feature (1)..(2): 2'-O-methyl
  misc_feature (3)..(3): 2'-deoxy-2'-fluoro
  misc_feature (4)..(4): 2'-O-methyl
  misc_feature (5)..(8): 2'-deoxy-2'-fluoro
  misc_feature (9)..(12): 2'-O-methyl
  misc_feature (13)..(17): 2'-deoxy-2'-fluoro
  misc_feature (18)..(19): 2'-O-methyl
  misc_feature (20)..(21): internucleotide phosphorothioate linkage
agcaccucaagaccuuuggnn

SEQ ID NO: 1888 - RNA, 21 nt, Artificial Sequence
  Description of Artificial Sequence: siNA antisense
  misc_feature (1)..(3): 2'-deoxy-2'-fluoro
  misc_feature (4)..(4): 2'-O-methyl
  misc_feature (5)..(5): 2'-deoxy-2'-fluoro
  misc_feature (6)..(8): 2'-O-methyl
  misc_feature (9)..(9): 2'-deoxy-2'-fluoro
  misc_feature (10)..(11): 2'-O-methyl
  misc_feature (12)..(14): 2'-deoxy-2'-fluoro
  misc_feature (15)..(15): 2'-O-methyl
  misc_feature (16)..(18): 2'-deoxy-2'-fluoro
  misc_feature (19)..(19): 2'-O-methyl
  misc_feature (20)..(21): internucleotide phosphorothioate linkage
cucacaagcagccuauccgnn

SEQ ID NO: 1889 - RNA, 21 nt, Artificial Sequence
  Description of Artificial Sequence: siNA antisense
  misc_feature (1)..(5): 2'-deoxy-2'-fluoro
  misc_feature (6)..(8): 2'-O-methyl
  misc_feature (9)..(9): 2'-deoxy-2'-fluoro
  misc_feature (10)..(10): 2'-O-methyl
  misc_feature (11)..(14): 2'-deoxy-2'-fluoro
  misc_feature (15)..(16): 2'-O-methyl
  misc_feature (17)..(17): 2'-deoxy-2'-fluoro
  misc_feature (18)..(19): 2'-O-methyl
  misc_feature (20)..(21): internucleotide phosphorothioate linkage
cucccaaguacccuagcagnn

SEQ ID NO: 1890 - RNA, 21 nt, Artificial Sequence
  Description of Artificial Sequence: siNA antisense
  misc_feature (1)..(3): 2'-deoxy-2'-fluoro
  misc_feature (4)..(4): 2'-O-methyl
  misc_feature (5)..(5): 2'-deoxy-2'-fluoro
  misc_feature (6)..(7): 2'-O-methyl
  misc_feature (8)..(9): 2'-deoxy-2'-fluoro
  misc_feature (10)..(10): 2'-O-methyl
  misc_feature (11)..(12): 2'-deoxy-2'-fluoro
  misc_feature (13)..(13): 2'-O-methyl
  misc_feature (14)..(14): 2'-deoxy-2'-fluoro
  misc_feature (15)..(15): 2'-O-methyl
  misc_feature (16)..(17): 2'-deoxy-2'-fluoro
  misc_feature (18)..(19): 2'-O-methyl
  misc_feature (20)..(21): internucleotide phosphorothioate linkage
cccgcaaucaccauaucggnn

SEQ ID NO: 1891 - RNA, 21 nt, Artificial Sequence
  Description of Artificial Sequence: siNA antisense
  misc_feature (1)..(1): 2'-O-methyl
  misc_feature (2)..(2): 2'-deoxy-2'-fluoro
  misc_feature (3)..(3): 2'-O-methyl
  misc_feature (4)..(6): 2'-deoxy-2'-fluoro
  misc_feature (7)..(7): 2'-O-methyl
  misc_feature (8)..(9): 2'-deoxy-2'-fluoro
  misc_feature (10)..(11): 2'-O-methyl
  misc_feature (12)..(12): 2'-deoxy-2'-fluoro
  misc_feature (13)..(13): 2'-O-methyl
  misc_feature (14)..(16): 2'-deoxy-2'-fluoro
  misc_feature (17)..(18): 2'-O-methyl
  misc_feature (19)..(19): 2'-deoxy-2'-fluoro
  misc_feature (20)..(21): internucleotide phosphorothioate linkage
guacucgccagcacccaaunn

SEQ ID NO: 1892 - RNA, 21 nt, Artificial Sequence
  Description of Artificial Sequence: siNA antisense
  misc_feature (1)..(2): 2'-deoxy-2'-fluoro
  misc_feature (3)..(3): 2'-O-methyl
  misc_feature (4)..(6): 2'-deoxy-2'-fluoro
  misc_feature (7)..(7): 2'-O-methyl
  misc_feature (8)..(8): 2'-deoxy-2'-fluoro
  misc_feature (9)..(11): 2'-O-methyl
  misc_feature (12)..(12): 2'-deoxy-2'-fluoro
  misc_feature (13)..(13): 2'-O-methyl
  misc_feature (14)..(15): 2'-deoxy-2'-fluoro
  misc_feature (16)..(16): 2'-O-methyl
  misc_feature (17)..(17): 2'-deoxy-2'-fluoro
  misc_feature (18)..(18): 2'-O-methyl
  misc_feature (19)..(19): 2'-deoxy-2'-fluoro
  misc_feature (20)..(21): internucleotide phosphorothioate linkage
ccacucgcaggcaccauaunn

SEQ ID NO: 1893 - RNA, 21 nt, Artificial Sequence
  Description of Artificial Sequence: siNA antisense
  misc_feature (1)..(1): 2'-O-methyl
  misc_feature (2)..(2): 2'-deoxy-2'-fluoro
  misc_feature (3)..(3): 2'-O-methyl
  misc_feature (4)..(4): 2'-deoxy-2'-fluoro
  misc_feature (5)..(5): 2'-O-methyl
  misc_feature (6)..(6): 2'-deoxy-2'-fluoro
  misc_feature (7)..(7): 2'-O-methyl
  misc_feature (8)..(8): 2'-deoxy-2'-fluoro
  misc_feature (9)..(11): 2'-O-methyl
  misc_feature (12)..(12): 2'-deoxy-2'-fluoro
  misc_feature (13)..(13): 2'-O-methyl
  misc_feature (14)..(19): 2'-deoxy-2'-fluoro
  misc_feature (20)..(21): internucleotide phosphorothioate linkage
acacgcgcaaguacccucunn

SEQ ID NO: 1894 - RNA, 21 nt, Artificial Sequence
  Description of Artificial Sequence: siNA sense
  misc_feature (1)..(1): 5'-3 attached terminal deoxyabasic moiety
  misc_feature (1)..(1): 2'-deoxy-2'-fluoro
  misc_feature (2)..(2): 2'-deoxy
  misc_feature (3)..(3): 2'-deoxy-2'-fluoro
  misc_feature (4)..(5): 2'-deoxy
  misc_feature (6)..(6): 2'-deoxy-2'-fluoro
  misc_feature (7)..(7): 2'-deoxy
  misc_feature (8)..(11): 2'-deoxy-2'-fluoro
  misc_feature (12)..(17): 2'-deoxy
  misc_feature (18)..(18): 2'-deoxy-2'-fluoro
  misc_feature (19)..(19): 2'-deoxy
  misc_feature (20)..(20): n is thymidine
  misc_feature (21)..(21): 3'-3 attached terminal deoxyabasic moiety
caugguguuccggaaagcgnn

SEQ ID NO: 1895 - RNA, 21 nt, Artificial Sequence
  Description of Artificial Sequence: siNA sense
  misc_feature (1)..(1): 5'-3 attached terminal deoxyabasic moiety
  misc_feature (1)..(2): 2'-deoxy-2'-fluoro
  misc_feature (3)..(3): 2'-deoxy
  misc_feature (4)..(4): 2'-deoxy-2'-fluoro
  misc_feature (5)..(6): 2'-deoxy
  misc_feature (7)..(7): 2'-deoxy-2'-fluoro
  misc_feature (8)..(8): 2'-deoxy
  misc_feature (9)..(12): 2'-deoxy-2'-fluoro
  misc_feature (13)..(18): 2'-deoxy
  misc_feature (19)..(19): 2'-deoxy-2'-fluoro
  misc_feature (20)..(20): n is thymidine
  misc_feature (21)..(21): 3'-3 attached terminal deoxyabasic moiety
ucaugguguuccggaaagcnn

SEQ ID NO: 1896 - RNA, 21 nt, Artificial Sequence
  Description of Artificial Sequence: siNA sense
  misc_feature (1)..(1): 5'-3 attached terminal deoxyabasic moiety
  misc_feature (1)..(3): 2'-deoxy
  misc_feature (4)..(4): 2'-deoxy-2'-fluoro
  misc_feature (5)..(5): 2'-deoxy
  misc_feature (6)..(8): 2'-deoxy-2'-fluoro
  misc_feature (9)..(9): 2'-deoxy
  misc_feature (10)..(10): 2'-deoxy-2'-fluoro
  misc_feature (11)..(14): 2'-deoxy
  misc_feature (15)..(15): 2'-deoxy-2'-fluoro
  misc_feature (16)..(17): 2'-deoxy
  misc_feature (18)..(19): 2'-deoxy-2'-fluoro
  misc_feature (20)..(20): n is thymidine
  misc_feature (21)..(21): 3'-3 attached terminal deoxyabasic moiety
gagcguucgugggauagucnn

SEQ ID NO: 1897 - RNA, 21 nt, Artificial Sequence
  Description of Artificial Sequence: siNA sense
  misc_feature (1)..(1): 5'-3 attached terminal deoxyabasic moiety
  misc_feature (1)..(1): 2'-deoxy-2'-fluoro
  misc_feature (2)..(2): 2'-deoxy
  misc_feature (3)..(3): 2'-deoxy-2'-fluoro
  misc_feature (4)..(6): 2'-deoxy
  misc_feature (7)..(7): 2'-deoxy-2'-fluoro
  misc_feature (8)..(8): 2'-deoxy
  misc_feature (9)..(11): 2'-deoxy-2'-fluoro
  misc_feature (12)..(12): 2'-deoxy
  misc_feature (13)..(13): 2'-deoxy-2'-fluoro
  misc_feature (14)..(17): 2'-deoxy
  misc_feature (18)..(18): 2'-deoxy-2'-fluoro
  misc_feature (19)..(19): 2'-deoxy
  misc_feature (20)..(20): n is thymidine
  misc_feature (21)..(21): 3'-3 attached terminal deoxyabasic moiety
cgugagcguucgugggauann

SEQ ID NO: 1898 - RNA, 21 nt, Artificial Sequence
  Description of Artificial Sequence: siNA antisense
  misc_feature (1)..(1): 2'-deoxy-2'-fluoro
  misc_feature (2)..(2): 2'-O-methyl
  misc_feature (3)..(8): 2'-deoxy-2'-fluoro
  misc_feature (9)..(12): 2'-O-methyl
  misc_feature (13)..(13): 2'-deoxy-2'-fluoro
  misc_feature (14)..(14): 2'-O-methyl
  misc_feature (15)..(16): 2'-deoxy-2'-fluoro
  misc_feature (17)..(17): 2'-O-methyl
  misc_feature (18)..(18): 2'-deoxy-2'-fluoro
  misc_feature (19)..(19): 2'-O-methyl
  misc_feature (20)..(21): internucleotide phosphorothioate linkage
cgcuuuccggaacaccaugnn

SEQ ID NO: 1899 - RNA, 21 nt, Artificial Sequence
  Description of Artificial Sequence: siNA antisense
  misc_feature (1)..(1): 2'-O-methyl
  misc_feature (2)..(7): 2'-deoxy-2'-fluoro
  misc_feature (8)..(11): 2'-O-methyl
  misc_feature (12)..(12): 2'-deoxy-2'-fluoro
  misc_feature (13)..(13): 2'-O-methyl
  misc_feature (14)..(15): 2'-deoxy-2'-fluoro
  misc_feature (16)..(16): 2'-O-methyl
  misc_feature (17)..(17): 2'-deoxy-2'-fluoro
  misc_feature (18)..(19): 2'-O-methyl
  misc_feature (20)..(21): internucleotide phosphorothioate linkage
gcuuuccggaacaccaugann

SEQ ID NO: 1900 - RNA, 21 nt, Artificial Sequence
  Description of Artificial Sequence: siNA antisense
  misc_feature (1)..(2): 2'-O-methyl
  misc_feature (3)..(4): 2'-deoxy-2'-fluoro
  misc_feature (5)..(5): 2'-O-methyl
  misc_feature (6)..(9): 2'-deoxy-2'-fluoro
  misc_feature (10)..(10): 2'-O-methyl
  misc_feature (11)..(11): 2'-deoxy-2'-fluoro
  misc_feature (12)..(14): 2'-O-methyl
  misc_feature (15)..(15): 2'-deoxy-2'-fluoro
  misc_feature (16)..(16): 2'-O-methyl
  misc_feature (17)..(19): 2'-deoxy-2'-fluoro
  misc_feature (20)..(21): internucleotide phosphorothioate linkage
gacuaucccacgaacgcucnn

SEQ ID NO: 1901 - RNA, 21 nt, Artificial Sequence
  Description of Artificial Sequence: siNA antisense
  misc_feature (1)..(1): 2'-deoxy-2'-fluoro
  misc_feature (2)..(2): 2'-O-methyl
  misc_feature (3)..(6): 2'-deoxy-2'-fluoro
  misc_feature (7)..(7): 2'-O-methyl
  misc_feature (8)..(8): 2'-deoxy-2'-fluoro
  misc_feature (9)..(11): 2'-O-methyl
  misc_feature (12)..(12): 2'-deoxy-2'-fluoro
  misc_feature (13)..(13): 2'-O-methyl
  misc_feature (14)..(16): 2'-deoxy-2'-fluoro
  misc_feature (17)..(17): 2'-O-methyl
  misc_feature (18)..(18): 2'-deoxy-2'-fluoro
  misc_feature (19)..(19): 2'-O-methyl
  misc_feature (20)..(21): internucleotide phosphorothioate linkage
uaucccacgaacgcucacgnn

SEQ ID NO: 1902 - RNA, 28 nt, Artificial Sequence
  Description of Artificial Sequence: siNA palindrome
  misc_feature (1)..(1): terminal phosphate group
  misc_feature (28)..(28): 3'-3 attached terminal deoxyabasic moiety
ucauacuaacgccauggcguuaguauga

SEQ ID NO: 1903 - RNA, 26 nt, Artificial Sequence
  Description of Artificial Sequence: siNA palindrome
  misc_feature (1)..(1): terminal phosphate group
  misc_feature (26)..(26): 3'-3 attached terminal deoxyabasic moiety
cauacuaacgccauggcguuaguaug

SEQ ID NO: 1904 - RNA, 24 nt, Artificial Sequence
  Description of Artificial Sequence: siNA palindrome
  misc_feature (1)..(1): terminal phosphate group
  misc_feature (24)..(24): 3'-3 attached terminal deoxyabasic moiety
auacuaacgccauggcguuaguau

SEQ ID NO: 1905 - RNA, 22 nt, Artificial Sequence
  Description of Artificial Sequence: siNA palindrome
  misc_feature (1)..(1): terminal phosphate group
  misc_feature (22)..(22): 3'-3 attached terminal deoxyabasic moiety
uacuaacgccauggcguuagua

SEQ ID NO: 1906 - RNA, 28 nt, Artificial Sequence
  Description of Artificial Sequence: siNA palindrome
  misc_feature (1)..(1): terminal phosphate group
  misc_feature (28)..(28): 3'-3 attached terminal deoxyabasic moiety
acuauggcucucccgggagagccauagu

SEQ ID NO: 1907 - RNA, 26 nt, Artificial Sequence
  Description of Artificial Sequence: siNA palindrome
  misc_feature (1)..(1): terminal phosphate group
  misc_feature (26)..(26): 3'-3 attached terminal deoxyabasic moiety
cuauggcucucccgggagagccauag

SEQ ID NO: 1908 - RNA, 24 nt, Artificial Sequence
  Description of Artificial Sequence: siNA palindrome
  misc_feature (1)..(1): terminal phosphate group
  misc_feature (24)..(24): 3'-3 attached terminal deoxyabasic moiety
uauggcucucccgggagagccaua

SEQ ID NO: 1909 - RNA, 22 nt, Artificial Sequence
  Description of Artificial Sequence: siNA palindrome
  misc_feature (1)..(1): terminal phosphate group
  misc_feature (22)..(22): 3'-3 attached terminal deoxyabasic moiety
auggcucucccgggagagccau

SEQ ID NO: 1910 - RNA, 20 nt, Artificial Sequence
  Description of Artificial Sequence: siNA palindrome
  misc_feature (1)..(1): terminal phosphate group
  misc_feature (20)..(20): 3'-3 attached terminal deoxyabasic moiety
uggcucucccgggagagcca

SEQ ID NO: 1911 - RNA, 28 nt, Artificial Sequence
  Description of Artificial Sequence: siNA palindrome
  misc_feature (1)..(1): terminal phosphate group
  misc_feature (28)..(28): 3'-3 attached terminal deoxyabasic moiety
ccgguguacucaccggugaguacaccgg

SEQ ID NO: 1912 - RNA, 26 nt, Artificial Sequence
  Description of Artificial Sequence: siNA palindrome
  misc_feature (1)..(1): terminal phosphate group
  misc_feature (26)..(26): 3'-3 attached terminal deoxyabasic moiety
cgguguacucaccggugaguacaccg

SEQ ID NO: 1913 - RNA, 24 nt, Artificial Sequence
  Description of Artificial Sequence: siNA palindrome
  misc_feature (1)..(1): terminal phosphate group
  misc_feature (24)..(24): 3'-3 attached terminal deoxyabasic moiety
gguguacucaccggugaguacacc

SEQ ID NO: 1914 - RNA, 28 nt, Artificial Sequence
  Description of Artificial Sequence: siNA palindrome
  misc_feature (1)..(1): terminal phosphate group
  misc_feature (28)..(28): 3'-3 attached terminal deoxyabasic moiety
cuacgagaccucccgggaggucucguag

SEQ ID NO: 1915 - RNA, 26 nt, Artificial Sequence
  Description of Artificial Sequence: siNA palindrome
  misc_feature (1)..(1): terminal phosphate group
  misc_feature (26)..(26): 3'-3 attached terminal deoxyabasic moiety
uacgagaccucccgggaggucucgua

SEQ ID NO: 1916 - RNA, 24 nt, Artificial Sequence
  Description of Artificial Sequence: siNA palindrome
  misc_feature (1)..(1): terminal phosphate group
  misc_feature (24)..(24): 3'-3 attached terminal deoxyabasic moiety
acgagaccucccgggaggucucgu

SEQ ID NO: 1917 - RNA, 21 nt, Artificial Sequence
  Description of Artificial Sequence: siNA antisense
  misc_feature (3)..(5): 2'-deoxy-2'-fluoro
  misc_feature (7)..(7): 2'-deoxy-2'-fluoro
  misc_feature (12)..(17): 2'-deoxy-2'-fluoro
  misc_feature (20)..(20): n is thymidine
  misc_feature (21)..(21): 3'-3 attached terminal deoxyabasic moiety
ggucuacgagaccucccggnn

SEQ ID NO: 1918 - RNA, 21 nt, Artificial Sequence
  Description of Artificial Sequence: siNA antisense
  misc_feature (3)..(8): 2'-deoxy-2'-fluoro
  misc_feature (13)..(13): 2'-deoxy-2'-fluoro
  misc_feature (15)..(17): 2'-deoxy-2'-fluoro
  misc_feature (20)..(20): n is thymidine
  misc_feature (21)..(21): 3'-3 attached terminal deoxyabasic moiety
ggcccuccagagcaucuggnn

SEQ ID NO: 1919 - RNA, 21 nt, Artificial Sequence
  Description of Artificial Sequence: siNA antisense
  misc_feature (1)..(3): 2'-deoxy-2'-fluoro
  misc_feature (5)..(5): 2'-deoxy-2'-fluoro
  misc_feature (9)..(9): 2'-deoxy-2'-fluoro
  misc_feature (11)..(14): 2'-deoxy-2'-fluoro
  misc_feature (16)..(17): 2'-deoxy-2'-fluoro
  misc_feature (20)..(20): n is thymidine
  misc_feature (21)..(21): 3'-3 attached terminal deoxyabasic moiety
cucgcaagcacccuaucagnn

SEQ ID NO: 1920 - RNA, 21 nt, Artificial Sequence
  Description of Artificial Sequence: siNA antisense
  misc_feature (3)..(4): 2'-deoxy-2'-fluoro
  misc_feature (6)..(9): 2'-deoxy-2'-fluoro
  misc_feature (11)..(11): 2'-deoxy-2'-fluoro
  misc_feature (15)..(15): 2'-deoxy-2'-fluoro
  misc_feature (17)..(19): 2'-deoxy-2'-fluoro
  misc_feature (20)..(20): n is thymidine
  misc_feature (21)..(21): 3'-3 attached terminal deoxyabasic moiety
gacuaucccacgaacgcucnn

SEQ ID NO: 1921 - RNA, 21 nt, Artificial Sequence
  Description of Artificial Sequence: siNA sense
  misc_feature (20)..(21): n is thymidine
gcgaaaggccuugugguacnn

SEQ ID NO: 1922 - RNA, 21 nt, Artificial Sequence
  Description of Artificial Sequence: siNA sense
  misc_feature (20)..(21): n is thymidine
cgaaaggccuugugguacunn

SEQ ID NO: 1923 - RNA, 21 nt, Artificial Sequence
  Description of Artificial Sequence: siNA sense
  misc_feature (20)..(21): n is thymidine
cugauagggugcuugcgagnn

SEQ ID NO: 1924 - RNA, 21 nt, Artificial Sequence
  Description of Artificial Sequence: siNA sense
  misc_feature (20)..(21): n is thymidine
auagggugcuugcgagugcnn

SEQ ID NO: 1925 - RNA, 21 nt, Artificial Sequence
  Description of Artificial Sequence: siNA sense
  misc_feature (20)..(21): n is thymidine
ccgggaggucucguagaccnn

SEQ ID NO: 1926 - RNA, 21 nt, Artificial Sequence
  Description of Artificial Sequence: siNA antisense
  misc_feature (20)..(21): n is thymidine
guaccacaaggccuuucgcnn

SEQ ID NO: 1927 - RNA, 21 nt, Artificial Sequence
  Description of Artificial Sequence: siNA antisense
  misc_feature (20)..(21): n is thymidine
aguaccacaaggccuuucgnn

SEQ ID NO: 1928 - RNA, 21 nt, Artificial Sequence
  Description of Artificial Sequence: siNA antisense
  misc_feature (20)..(21): n is thymidine
cucgcaagcacccuaucagnn

SEQ ID NO: 1929 - RNA, 21 nt, Artificial Sequence
  Description of Artificial Sequence: siNA antisense
  misc_feature (20)..(21): n is thymidine
gcacucgcaagcacccuaunn

SEQ ID NO: 1930 - RNA, 21 nt, Artificial Sequence
  Description of Artificial Sequence: siNA sense
  misc_feature (20)..(21): n is thymidine
caugguguuccggaaagcgnn

SEQ ID NO: 1931 - RNA, 21 nt, Artificial Sequence
  Description of Artificial Sequence: siNA sense
  misc_feature (20)..(21): n is thymidine
ucaugguguuccggaaagcnn

SEQ ID NO: 1932 - RNA, 21 nt, Artificial Sequence
  Description of Artificial Sequence: siNA sense
  misc_feature (20)..(21): n is thymidine
gagcguucgugggauagucnn

SEQ ID NO: 1933 - RNA, 21 nt, Artificial Sequence
  Description of Artificial Sequence: siNA sense
  misc_feature (20)..(21): n is thymidine
cgugagcguucgugggauann

SEQ ID NO: 1934 - RNA, 21 nt, Artificial Sequence
  Description of Artificial Sequence: siNA sense
  misc_feature (20)..(21): n is thymidine
ccagaugcucuggagggccnn

SEQ ID NO: 1935 - RNA, 21 nt, Artificial Sequence
  Description of Artificial Sequence: siNA antisense
  misc_feature (20)..(21): n is thymidine
cgcuuuccggaacaccaugnn

SEQ ID NO: 1936 - RNA, 21 nt, Artificial Sequence
  Description of Artificial Sequence: siNA antisense
  misc_feature (20)..(21): n is thymidine
gcuuuccggaacaccaugann

SEQ ID NO: 1937 - RNA, 21 nt, Artificial Sequence
  Description of Artificial Sequence: siNA antisense
  misc_feature (20)..(21): n is thymidine
gacuaucccacgaacgcucnn

SEQ ID NO: 1938 - RNA, 21 nt, Artificial Sequence
  Description of Artificial Sequence: siNA antisense
  misc_feature (20)..(21): n is thymidine
uaucccacgaacgcucacgnn

SEQ ID NO: 1939 - RNA, 21 nt, Artificial Sequence
  Description of Artificial Sequence: siNA antisense
  misc_feature (20)..(21): n is thymidine
ggcccuccagagcaucuggnn

SEQ ID NO: 1940 - RNA, 21 nt, Artificial Sequence
  Description of Artificial Sequence: siNA sense
  misc_feature (1)..(1): 5'-3 attached terminal deoxyabasic moiety
  misc_feature (1)..(2): 2'-deoxy-2'-fluoro
  misc_feature (9)..(12): 2'-deoxy-2'-fluoro
  misc_feature (20)..(20): n is thymidine
  misc_feature (21)..(21): 3'-3 attached terminal deoxyabasic moiety
ccgggaggucucguagaccnn

SEQ ID NO: 1941 - RNA, 21 nt, Artificial Sequence
  Description of Artificial Sequence: siNA antisense
  misc_feature (1)..(2): 2'-O-methyl
  misc_feature (6)..(6): 2'-O-methyl
  misc_feature (7)..(7): 2'-deoxy-2'-fluoro
  misc_feature (8)..(11): 2'-O-methyl
  misc_feature (12)..(17): 2'-deoxy-2'-fluoro
  misc_feature (18)..(19): 2'-O-methyl
  misc_feature (20)..(21): internucleotide phosphorothioate linkage
ggucuacgagaccucccggnn

SEQ ID NO: 1942 - RNA, 21 nt, Artificial Sequence
  Description of Artificial Sequence: siNA antisense
  misc_feature (1)..(2): 2'-O-methyl
  misc_feature (4)..(5): 2'-deoxy-2'-fluoro
  misc_feature (6)..(6): 2'-O-methyl
  misc_feature (7)..(7): 2'-deoxy-2'-fluoro
  misc_feature (8)..(11): 2'-O-methyl
  misc_feature (12)..(17): 2'-deoxy-2'-fluoro
  misc_feature (18)..(19): 2'-O-methyl
  misc_feature (20)..(21): internucleotide phosphorothioate linkage
ggucuacgagaccucccggnn

SEQ ID NO: 1943 - RNA, 21 nt, Artificial Sequence
  Description of Artificial Sequence: siNA antisense
  misc_feature (1)..(2): 2'-O-methyl
  misc_feature (3)..(5): 2'-deoxy-2'-fluoro
  misc_feature (6)..(6): 2'-O-methyl
  misc_feature (7)..(7): 2'-deoxy-2'-fluoro
  misc_feature (8)..(11): 2'-O-methyl
  misc_feature (12)..(17): 2'-deoxy-2'-fluoro
  misc_feature (18)..(19): 2'-O-methyl
  misc_feature (20)..(21): internucleotide phosphorothioate linkage
ggucuacgagaccucccggnn

SEQ ID NO: 1944 - RNA, 21 nt, Artificial Sequence
  Description of Artificial Sequence: siNA antisense
  misc_feature (1)..(2): 2'-O-methyl
  misc_feature (3)..(5): 2'-deoxy-2'-fluoro
  misc_feature (6)..(6): 2'-O-methyl
  misc_feature (7)..(7): 2'-deoxy-2'-fluoro
  misc_feature (8)..(11): 2'-O-methyl
  misc_feature (12)..(17): 2'-deoxy-2'-fluoro
  misc_feature (18)..(19): 2'-O-methyl
  misc_feature (20)..(21): internucleotide phosphorothioate linkage
ggucuacgagaccucccggnn

SEQ ID NO: 1945 - RNA, 21 nt, Artificial Sequence
  Description of Artificial Sequence: siNA sense
  misc_feature (1)..(1): 5'-3 attached terminal deoxyabasic moiety
  misc_feature (1)..(2): 2'-deoxy-2'-fluoro
  misc_feature (3)..(4): 2'-deoxy
  misc_feature (5)..(5): 2'-deoxy-2'-fluoro
  misc_feature (6)..(9): 2'-deoxy
  misc_feature (10)..(10): 2'-deoxy-2'-fluoro
  misc_feature (11)..(11): 2'-deoxy
  misc_feature (12)..(13): 2'-deoxy-2'-fluoro
  misc_feature (15)..(15): 2'-deoxy
  misc_feature (17)..(19): 2'-deoxy
  misc_feature (20)..(20): n is thymidine
  misc_feature (21)..(21): 3'-3 attached terminal deoxyabasic moiety
cugauagggugcuugcgagnn

SEQ ID NO: 1946 - RNA, 21 nt, Artificial Sequence
  Description of Artificial Sequence: siNA antisense
  misc_feature (4)..(4): 2'-O-methyl
  misc_feature (6)..(8): 2'-O-methyl
  misc_feature (9)..(9): 2'-deoxy-2'-fluoro
  misc_feature (10)..(10): 2'-O-methyl
  misc_feature (11)..(14): 2'-deoxy-2'-fluoro
  misc_feature (15)..(15): 2'-O-methyl
  misc_feature (16)..(17): 2'-deoxy-2'-fluoro
  misc_feature (18)..(19): 2'-O-methyl
  misc_feature (20)..(21): internucleotide phosphorothioate linkage
cucgcaagcacccuaucagnn

SEQ ID NO: 1947 - RNA, 21 nt, Artificial Sequence
  Description of Artificial Sequence: siNA antisense
  misc_feature (4)..(4): 2'-O-methyl
  misc_feature (5)..(5): 2'-deoxy-2'-fluoro
  misc_feature (6)..(8): 2'-O-methyl
  misc_feature (9)..(9): 2'-deoxy-2'-fluoro
  misc_feature (10)..(10): 2'-O-methyl
  misc_feature (11)..(14): 2'-deoxy-2'-fluoro
  misc_feature (15)..(15): 2'-O-methyl
  misc_feature (16)..(17): 2'-deoxy-2'-fluoro
  misc_feature (18)..(19): 2'-O-methyl
  misc_feature (20)..(21): internucleotide phosphorothioate linkage
cucgcaagcacccuaucagnn

SEQ ID NO: 1948 - RNA, 21 nt, Artificial Sequence
  Description of Artificial Sequence: siNA antisense
  misc_feature (3)..(3): 2'-deoxy-2'-fluoro
  misc_feature (4)..(4): 2'-O-methyl
  misc_feature (5)..(5): 2'-deoxy-2'-fluoro
  misc_feature (6)..(8): 2'-O-methyl
  misc_feature (9)..(9): 2'-deoxy-2'-fluoro
  misc_feature (10)..(10): 2'-O-methyl
  misc_feature (11)..(14): 2'-deoxy-2'-fluoro
  misc_feature (15)..(15): 2'-O-methyl
  misc_feature (16)..(17): 2'-deoxy-2'-fluoro
  misc_feature (18)..(19): 2'-O-methyl
  misc_feature (20)..(21): internucleotide phosphorothioate linkage
cucgcaagcacccuaucagnn

SEQ ID NO: 1949 - RNA, 21 nt, Artificial Sequence
  Description of Artificial Sequence: siNA antisense
  misc_feature (2)..(3): 2'-deoxy-2'-fluoro
  misc_feature (4)..(4): 2'-O-methyl
  misc_feature (5)..(5): 2'-deoxy-2'-fluoro
  misc_feature (6)..(8): 2'-O-methyl
  misc_feature (9)..(9): 2'-deoxy-2'-fluoro
  misc_feature (10)..(10): 2'-O-methyl
  misc_feature (11)..(14): 2'-deoxy-2'-fluoro
  misc_feature (15)..(15): 2'-O-methyl
  misc_feature (16)..(17): 2'-deoxy-2'-fluoro
  misc_feature (18)..(19): 2'-O-methyl
  misc_feature (20)..(21): internucleotide phosphorothioate linkage
cucgcaagcacccuaucagnn

SEQ ID NO: 1950 - RNA, 38 nt, Artificial Sequence
  Description of Artificial Sequence: siNA palindrome
ggucuacgagaccucccggccgggaggucucguagacc

SEQ ID NO: 1951 - RNA, 40 nt, Artificial Sequence
  Description of Artificial Sequence: siNA palindrome
  misc_feature (39)..(40): n is thymidine
ggucuacgagaccucccggccgggaggucucguagaccnn

SEQ ID NO: 1952 - RNA, 36 nt, Artificial Sequence
  Description of Artificial Sequence: siNA palindrome
ggucuacgagaccucccgcgggaggucucguagacc

SEQ ID NO: 1953 - RNA, 38 nt, Artificial Sequence
  Description of Artificial Sequence: siNA palindrome
  misc_feature (37)..(38): n is thymidine
ggucuacgagaccucccgcgggaggucucguagaccnn

SEQ ID NO: 1954 - RNA, 34 nt, Artificial Sequence
  Description of Artificial Sequence: siNA palindrome
ggucuacgagaccucccgggaggucucguagacc

SEQ ID NO: 1955 - RNA, 36 nt, Artificial Sequence
  Description of Artificial Sequence: siNA palindrome
  misc_feature (35)..(36): n is thymidine
ggucuacgagaccucccgggaggucucguagaccnn

SEQ ID NO: 1956 - RNA, 32 nt, Artificial Sequence
  Description of Artificial Sequence: siNA palindrome
ggucuacgagaccuccggaggucucguagacc

SEQ ID NO: 1957 - RNA, 34 nt, Artificial Sequence
  Description of Artificial Sequence: siNA palindrome
  misc_feature (33)..(34): n is thymidine
ggucuacgagaccuccggaggucucguagaccnn

SEQ ID NO: 1958 - RNA, 32 nt, Artificial Sequence
  Description of Artificial Sequence: siNA palindrome
gucuacgagaccucccgggaggucucguagac

SEQ ID NO: 1959 - RNA, 34 nt, Artificial Sequence
  Description of Artificial Sequence: siNA palindrome
  misc_feature (33)..(34): n is thymidine
gucuacgagaccucccgggaggucucguagacnn

SEQ ID NO: 1960 - RNA, 30 nt, Artificial Sequence
  Description of Artificial Sequence: siNA palindrome
ucuacgagaccucccgggaggucucguaga

SEQ ID NO: 1961 - RNA, 32 nt, Artificial Sequence
  Description of Artificial Sequence: siNA palindrome
  misc_feature (31)..(32): n is thymidine
ucuacgagaccucccgggaggucucguagann

SEQ ID NO: 1962 - RNA, 28 nt, Artificial Sequence
  Description of Artificial Sequence: siNA palindrome
cuacgagaccucccgggaggucucguag

SEQ ID NO: 1963 - RNA, 30 nt, Artificial Sequence
  Description of Artificial Sequence: siNA palindrome
  misc_feature (29)..(30): n is thymidine
cuacgagaccucccgggaggucucguagnn

SEQ ID NO: 1964 - RNA, 30 nt, Artificial Sequence
  Description of Artificial Sequence: siNA palindrome
ggucuacgagaccuccaggucucguagacc

SEQ ID NO: 1965 - RNA, 32 nt, Artificial Sequence
  Description of Artificial Sequence: siNA palindrome
  misc_feature (31)..(32): n is thymidine
ggucuacgagaccuccaggucucguagaccnn

SEQ ID NO: 1966 - RNA, 30 nt, Artificial Sequence
  Description of Artificial Sequence: siNA palindrome
ggucuacgagaccucgaggucucguagacc

SEQ ID NO: 1967 - RNA, 32 nt, Artificial Sequence
  Description of Artificial Sequence: siNA palindrome
  misc_feature (31)..(32): n is thymidine
ggucuacgagaccucgaggucucguagaccnn

SEQ ID NO: 1968 - RNA, 30 nt, Artificial Sequence
  Description of Artificial Sequence: siNA palindrome
ggucuacgagaccugcaggucucguagacc

SEQ ID NO: 1969 - RNA, 32 nt, Artificial Sequence
  Description of Artificial Sequence: siNA palindrome
  misc_feature (31)..(32): n is thymidine
ggucuacgagaccugcaggucucguagaccnn

SEQ ID NO: 1970 - RNA, 40 nt, Artificial Sequence
  Description of Artificial Sequence: siNA palindrome
  misc_feature (39)..(40): n is thymidine
gacuaucccacgaacgcucgagcguucgugggauagucnn

SEQ ID NO: 1971 - RNA, 38 nt, Artificial Sequence
  Description of Artificial Sequence: siNA palindrome
gacuaucccacgaacgcucgagcguucgugggauaguc

SEQ ID NO: 1972 - RNA, 34 nt, Artificial Sequence
  Description of Artificial Sequence: siNA palindrome
  misc_feature (33)..(34): n is thymidine
gacuaucccacgaacgcguucgugggauagucnn

SEQ ID NO: 1973 - RNA, 32 nt, Artificial Sequence
  Description of Artificial Sequence: siNA palindrome
gacuaucccacgaacgcguucgugggauaguc

SEQ ID NO: 1974 - RNA, 32 nt, Artificial Sequence
  Description of Artificial Sequence: siNA palindrome
  misc_feature (31)..(32): n is thymidine
gacuaucccacgaacguucgugggauagucnn

SEQ ID NO: 1975 - RNA, 30 nt, Artificial Sequence
  Description of Artificial Sequence: siNA palindrome
gacuaucccacgaacguucgugggauaguc

SEQ ID NO: 1976 - RNA, 30 nt, Artificial Sequence
  Description of Artificial Sequence: siNA palindrome
  misc_feature (29)..(30): n is thymidine
acuaucccacgaacguucgugggauagunn

SEQ ID NO: 1977 - RNA, 24 nt, Artificial Sequence
  Description of Artificial Sequence: siNA palindrome
acuaucccacgaacguucguggga

SEQ ID NO: 1978 - RNA, 42 nt, Artificial Sequence
  Description of Artificial Sequence: siNA sense
  misc_feature (20)..(20): n is thymidine
  misc_feature (21)..(22): internucleotide hexethelyne glycol
  misc_feature (41)..(42): n is thymidine
ccgggaggucucguagaccnngcgaaaggccuugugguacnn

SEQ ID NO: 1979 - RNA, 42 nt, Artificial Sequence
  Description of Artificial Sequence: siNA sense
  misc_feature (20)..(20): n is thymidine
  misc_feature (21)..(22): internucleotide hexethelyne glycol
  misc_feature (41)..(42): n is thymidine
ccgggaggucucguagaccnnauagggugcuugcgagugcnn

SEQ ID NO: 1980 - RNA, 42 nt, Artificial Sequence
  Description of Artificial Sequence: siNA sense
  misc_feature (20)..(20): n is thymidine
  misc_feature (21)..(22): internucleotide hexethelyne glycol
  misc_feature (41)..(42): n is thymidine
auagggugcuugcgagugcnngcgaaaggccuugugguacnn

SEQ ID NO: 1981 - RNA, 21 nt, Artificial Sequence
  Description of Artificial Sequence: siNA sense
  misc_feature (1)..(1): 5'-3 attached terminal deoxyabasic moiety
  misc_feature (20)..(20): n is thymidine
  misc_feature (21)..(21): 3'-3 attached terminal deoxyabasic moiety
cugauagggugcuugcgagnn

SEQ ID NO: 1982 - RNA, 21 nt, Artificial Sequence
  Description of Artificial Sequence: siNA antisense
  misc_feature (20)..(21): internucleotide phosphorothioate linkage
cucgcaagcacccuaucagnn

SEQ ID NO: 1983 - RNA, 21 nt, Artificial Sequence
  Description of Artificial Sequence: siNA sense
  misc_feature (1)..(1): 5'-3 attached terminal deoxyabasic moiety
  misc_feature (1)..(2): 2'-deoxy-2'-fluoro
  misc_feature (5)..(5): 2'-deoxy-2'-fluoro
  misc_feature (10)..(10): 2'-deoxy-2'-fluoro
  misc_feature (12)..(14): 2'-deoxy-2'-fluoro
  misc_feature (16)..(16): 2'-deoxy-2'-fluoro
  misc_feature (20)..(20): n is thymidine
  misc_feature (21)..(21): 3'-3 attached terminal deoxyabasic moiety
cugauagggugcuugcgagnn

SEQ ID NO: 1984 - RNA, 21 nt, Artificial Sequence
  Description of Artificial Sequence: siNA antisense
  misc_feature (1)..(3): 2'-deoxy-2'-fluoro
  misc_feature (5)..(5): 2'-deoxy-2'-fluoro
  misc_feature (9)..(9): 2'-deoxy-2'-fluoro
  misc_feature (11)..(14): 2'-deoxy-2'-fluoro
  misc_feature (16)..(17): 2'-deoxy-2'-fluoro
  misc_feature (20)..(21): internucleotide phosphorothioate linkage
cucgcaagcacccuaucagnn

SEQ ID NO: 1985 - RNA, 42 nt, Artificial Sequence; identical to SEQ ID NO: 1979
  Description of Artificial Sequence: siNA sense
  misc_feature (1)..(1): 5'-3 attached terminal deoxyabasic moiety
  misc_feature (1)..(2): 2'-deoxy-2'-fluoro
  misc_feature (3)..(8): 2'-deoxy
  misc_feature (9)..(12): 2'-deoxy-2'-fluoro
  misc_feature (13)..(13): 2'-deoxy
  misc_feature (14)..(14): 2'-deoxy-2'-fluoro
  misc_feature (15)..(17): 2'-deoxy
  misc_feature (18)..(19): 2'-deoxy-2'-fluoro
  misc_feature (20)..(20): n is thymidine
  misc_feature (21)..(22): internucleotide hexethelyne glycol
  misc_feature (23)..(23): 2'-deoxy-2'-fluoro
  misc_feature (29)..(29): 2'-deoxy-2'-fluoro
  misc_feature (31)..(33): 2'-deoxy-2'-fluoro
  misc_feature (35)..(35): 2'-deoxy-2'-fluoro
  misc_feature (39)..(39): 2'-deoxy-2'-fluoro
  misc_feature (41)..(41): 2'-deoxy-2'-fluoro
  misc_feature (42)..(42): 3'-3 attached terminal deoxyabasic moiety

SEQ ID NO: 1986 - RNA, 21 nt, Artificial Sequence
  Description of Artificial Sequence: siNA antisense
  misc_feature (1)..(1): 2'-O-methyl
  misc_feature (3)..(3): 2'-O-methyl
  misc_feature (4)..(6): 2'-deoxy-2'-fluoro
  misc_feature (7)..(7): 2'-O-methyl
  misc_feature (8)..(8): 2'-deoxy-2'-fluoro
  misc_feature (9)..(11): 2'-O-methyl
  misc_feature (12)..(12): 2'-deoxy-2'-fluoro
  misc_feature (13)..(13): 2'-O-methyl
  misc_feature (14)..(17): 2'-deoxy-2'-fluoro
  misc_feature (18)..(18): 2'-O-methyl
  misc_feature (19)..(19): 2'-deoxy-2'-fluoro
  misc_feature (20)..(21): n is thymidine
gcacucgcaagcacccuaunn

SEQ ID NO: 1987 - RNA, 21 nt, Artificial Sequence
  Description of Artificial Sequence: siNA antisense
  misc_feature (1)..(2): 2'-O-methyl
  misc_feature (4)..(5): 2'-deoxy-2'-fluoro
  misc_feature (6)..(6): 2'-O-methyl
  misc_feature (7)..(7): 2'-deoxy-2'-fluoro
  misc_feature (8)..(11): 2'-O-methyl
  misc_feature (12)..(17): 2'-deoxy-2'-fluoro
  misc_feature (18)..(19): 2'-O-methyl
  misc_feature (20)..(21): n is thymidine
ggucuacgagaccucccggnn

SEQ ID NO: 1988 - RNA, 21 nt, Artificial Sequence
  Description of Artificial Sequence: siNA antisense
  misc_feature (1)..(1): 2'-O-methyl
  misc_feature (3)..(3): 2'-O-methyl
  misc_feature (4)..(5): 2'-deoxy-2'-fluoro
  misc_feature (6)..(6): 2'-O-methyl
  misc_feature (7)..(7): 2'-deoxy-2'-fluoro
  misc_feature (8)..(11): 2'-O-methyl
  misc_feature (12)..(17): 2'-deoxy-2'-fluoro
  misc_feature (18)..(18): 2'-O-methyl
  misc_feature (19)..(19): 2'-deoxy-2'-fluoro
  misc_feature (20)..(21): internucleotide phosphorothioate linkage
guaccacaaggccuuucgcnn

SEQ ID NO: 1989 - RNA, 21 nt, Artificial Sequence
  Description of Artificial Sequence: siNA antisense
  misc_feature (1)..(2): 2'-O-methyl
  misc_feature (4)..(4): 2'-O-methyl
  misc_feature (5)..(6): 2'-deoxy-2'-fluoro
  misc_feature (7)..(7): 2'-O-methyl
  misc_feature (8)..(8): 2'-deoxy-2'-fluoro
  misc_feature (9)..(12): 2'-O-methyl
  misc_feature (13)..(18): 2'-deoxy-2'-fluoro
  misc_feature (19)..(19): 2'-O-methyl
  misc_feature (20)..(21): internucleotide phosphorothioate linkage
aguaccacaaggccuuucgnn

SEQ ID NO: 1990 - RNA, 21 nt, Artificial Sequence
  Description of Artificial Sequence: siNA antisense
  misc_feature (1)..(1): 2'-O-methyl
  misc_feature (3)..(3): 2'-O-methyl
  misc_feature (4)..(6): 2'-deoxy-2'-fluoro
  misc_feature (7)..(7): 2'-O-methyl
  misc_feature (8)..(8): 2'-deoxy-2'-fluoro
  misc_feature (9)..(11): 2'-O-methyl
  misc_feature (12)..(12): 2'-deoxy-2'-fluoro
  misc_feature (13)..(13): 2'-O-methyl
  misc_feature (14)..(17): 2'-deoxy-2'-fluoro
  misc_feature (18)..(18): 2'-O-methyl
  misc_feature (19)..(19): 2'-deoxy-2'-fluoro
  misc_feature (20)..(21): internucleotide phosphorothioate linkage
gcacucgcaagcacccuaunn

SEQ ID NO: 1991 - RNA, 21 nt, Artificial Sequence
  Description of Artificial Sequence: siNA antisense
  misc_feature (4)..(4): 2'-O-methyl
  misc_feature (5)..(5): 2'-deoxy-2'-fluoro
  misc_feature (6)..(8): 2'-O-methyl
  misc_feature (9)..(9): 2'-deoxy-2'-fluoro
  misc_feature (10)..(10): 2'-O-methyl
  misc_feature (11)..(14): 2'-deoxy-2'-fluoro
  misc_feature (15)..(15): 2'-O-methyl
  misc_feature (16)..(17): 2'-deoxy-2'-fluoro
  misc_feature (18)..(19): 2'-O-methyl
  misc_feature (20)..(21): n is thymidine
cucgcaagcacccuaucagnn

SEQ ID NO: 1992 - RNA, 21 nt, Artificial Sequence
  Description of Artificial Sequence: siNA antisense
  misc_feature (4)..(4): 2'-O-methyl
  misc_feature (5)..(5): 2'-deoxy-2'-fluoro
  misc_feature (6)..(8): 2'-O-methyl
  misc_feature (9)..(9): 2'-deoxy-2'-fluoro
  misc_feature (10)..(10): 2'-O-methyl
  misc_feature (11)..(14): 2'-deoxy-2'-fluoro
  misc_feature (15)..(15): 2'-O-methyl
  misc_feature (16)..(17): 2'-deoxy-2'-fluoro
  misc_feature (18)..(19): 2'-O-methyl
  misc_feature (20)..(20): n is thymidine
  misc_feature (21)..(21): 3'-3 attached terminal deoxyabasic moiety
cucgcaagcacccuaucagnn

SEQ ID NO: 1993 - RNA, 21 nt, Artificial Sequence
  Description of Artificial Sequence: siNA antisense
  misc_feature (1)..(1): 2'-O-methyl
  misc_feature (2)..(2): 2'-deoxy-2'-fluoro
  misc_feature (3)..(3): 2'-O-methyl
  misc_feature (4)..(5): 2'-deoxy-2'-fluoro
  misc_feature (6)..(6): 2'-O-methyl
  misc_feature (7)..(7): 2'-deoxy-2'-fluoro
  misc_feature (8)..(11): 2'-O-methyl
  misc_feature (12)..(17): 2'-deoxy-2'-fluoro
  misc_feature (18)..(18): 2'-O-methyl
  misc_feature (19)..(19): 2'-deoxy-2'-fluoro
  misc_feature (20)..(20): n is thymidine
  misc_feature (21)..(21): 3'-3 attached terminal deoxyabasic moiety
guaccacaaggccuuucgcnn

SEQ ID NO: 1994 - RNA, 21 nt, Artificial Sequence
  Description of Artificial Sequence: siNA antisense
  misc_feature (1)..(1): 2'-O-methyl
  misc_feature (3)..(3): 2'-O-methyl
  misc_feature (4)..(5): 2'-deoxy-2'-fluoro
  misc_feature (6)..(6): 2'-O-methyl
  misc_feature (7)..(7): 2'-deoxy-2'-fluoro
  misc_feature (8)..(11): 2'-O-methyl
  misc_feature (12)..(17): 2'-deoxy-2'-fluoro
  misc_feature (18)..(18): 2'-O-methyl
  misc_feature (19)..(19): 2'-deoxy-2'-fluoro
  misc_feature (20)..(21): n is thymidine
guaccacaaggccuuucgcnn

SEQ ID NO: 1995 - RNA, 21 nt, Artificial Sequence
  Description of Artificial Sequence: siNA antisense
  misc_feature (1)..(1): 2'-O-methyl
  misc_feature (3)..(3): 2'-O-methyl
  misc_feature (4)..(5): 2'-deoxy-2'-fluoro
  misc_feature (6)..(6): 2'-O-methyl
  misc_feature (7)..(7): 2'-deoxy-2'-fluoro
  misc_feature (8)..(11): 2'-O-methyl
  misc_feature (12)..(17): 2'-deoxy-2'-fluoro
  misc_feature (18)..(18): 2'-O-methyl
  misc_feature (19)..(19): 2'-deoxy-2'-fluoro
  misc_feature (20)..(20): n is thymidine
  misc_feature (21)..(21): 3'-3 attached terminal deoxyabasic moiety
guaccacaaggccuuucgcnn

SEQ ID NO: 1996 - RNA, 21 nt, Artificial Sequence
  Description of Artificial Sequence: siNA antisense
  misc_feature (1)..(1): 2'-O-methyl
  misc_feature (2)..(2): 2'-deoxy-2'-fluoro
  misc_feature (3)..(3): 2'-O-methyl
  misc_feature (4)..(5): 2'-deoxy-2'-fluoro
  misc_feature (6)..(6): 2'-O-methyl
  misc_feature (7)..(7): 2'-deoxy-2'-fluoro
  misc_feature (8)..(11): 2'-O-methyl
  misc_feature (12)..(17): 2'-deoxy-2'-fluoro
  misc_feature (17)..(17): 2'-O-methyl
  misc_feature (19)..(19): 2'-deoxy-2'-fluoro
  misc_feature (20)..(21): internucleotide phosphorothioate linkage
guaccacaaggccuuucgcnn

SEQ ID NO: 1997 - RNA, 21 nt, Artificial Sequence
  Description of Artificial Sequence: siNA antisense
  misc_feature (1)..(1): 2'-O-methyl
  misc_feature (2)..(2): 2'-deoxy-2'-fluoro
  misc_feature (3)..(3): 2'-O-methyl
  misc_feature (4)..(5): 2'-deoxy-2'-fluoro
  misc_feature (6)..(6): 2'-O-methyl
  misc_feature (7)..(7): 2'-deoxy-2'-fluoro
  misc_feature (8)..(11): 2'-O-methyl
  misc_feature (12)..(17): 2'-deoxy-2'-fluoro
  misc_feature (18)..(18): 2'-O-methyl
  misc_feature (19)..(19): 2'-deoxy-2'-fluoro
  misc_feature (20)..(21): n is thymidine
guaccacaaggccuuucgcnn

SEQ ID NO: 1998 - RNA, 21 nt, Artificial Sequence
  Description of Artificial Sequence: siNA antisense
  misc_feature (1)..(1): 2'-O-methyl
  misc_feature (2)..(2): 2'-deoxy-2'-fluoro
  misc_feature (3)..(3): 2'-O-methyl
  misc_feature (4)..(5): 2'-deoxy-2'-fluoro
  misc_feature (6)..(6): 2'-O-methyl
  misc_feature (7)..(7): 2'-deoxy-2'-fluoro
  misc_feature (8)..(11): 2'-O-methyl
  misc_feature (12)..(17): 2'-deoxy-2'-fluoro
  misc_feature (18)..(18): 2'-O-methyl
  misc_feature (19)..(19): 2'-deoxy-2'-fluoro
  misc_feature (20)..(20): n is thymidine
  misc_feature (21)..(21): 3'-3 attached terminal deoxyabasic moiety
guaccacaaggccuuucgcnn

SEQ ID NO: 1999 - RNA, 21 nt, Artificial Sequence
  Description of Artificial Sequence: siNA antisense
  misc_feature (1)..(1): 2'-O-methyl
  misc_feature (2)..(2): 2'-deoxy-2'-fluoro
  misc_feature (3)..(3): 2'-O-methyl
  misc_feature (4)..(5): 2'-deoxy-2'-fluoro
  misc_feature (6)..(6): 2'-O-methyl
  misc_feature (7)..(7): 2'-deoxy-2'-fluoro
  misc_feature (8)..(11): 2'-O-methyl
  misc_feature (12)..(17): 2'-deoxy-2'-fluoro
  misc_feature (18)..(18): 2'-O-methyl
  misc_feature (19)..(19): 2'-deoxy-2'-fluoro
  misc_feature (20)..(21): n is thymidine
guaccacaaggccuuucgcnn

SEQ ID NO: 2000 - RNA, 21 nt, Artificial Sequence
  Description of Artificial Sequence: siNA antisense
  misc_feature (1)..(3): 2'-deoxy-2'-fluoro
  misc_feature (4)..(4): 2'-O-methyl
  misc_feature (5)..(5): 2'-deoxy-2'-fluoro
  misc_feature (6)..(8): 2'-O-methyl
  misc_feature (9)..(9): 2'-deoxy-2'-fluoro
  misc_feature (10)..(10): 2'-O-methyl
  misc_feature (11)..(14): 2'-deoxy-2'-fluoro
  misc_feature (15)..(15): 2'-O-methyl
  misc_feature (16)..(17): 2'-deoxy-2'-fluoro
  misc_feature (18)..(19): 2'-O-methyl
  misc_feature (20)..(21): n is thymidine
cucgcaagcacccuaucagnn

SEQ ID NO: 2001 - RNA, 21 nt, Artificial Sequence
  Description of Artificial Sequence: siNA antisense
  misc_feature (1)..(2): 2'-O-methyl
  misc_feature (4)..(5): 2'-deoxy-2'-fluoro
  misc_feature (6)..(6): 2'-O-methyl
  misc_feature (7)..(7): 2'-deoxy-2'-fluoro
  misc_feature (8)..(11): 2'-O-methyl
  misc_feature (12)..(17): 2'-deoxy-2'-fluoro
  misc_feature (18)..(19): 2'-O-methyl
  misc_feature (20)..(20): n is thymidine
  misc_feature (21)..(21): 3'-3 attached terminal deoxyabasic moiety
ggucuacgagaccucccggnn

SEQ ID NO: 2002 - RNA, 21 nt, Artificial Sequence
  Description of Artificial Sequence: siNA antisense
  misc_feature (1)..(2): 2'-O-methyl
  misc_feature (3)..(5): 2'-deoxy-2'-fluoro
  misc_feature (6)..(6): 2'-O-methyl
  misc_feature (7)..(7): 2'-deoxy-2'-fluoro
  misc_feature (8)..(11): 2'-O-methyl
  misc_feature (12)..(17): 2'-deoxy-2'-fluoro
  misc_feature (18)..(19): 2'-O-methyl
  misc_feature (20)..(21): n is thymidine
ggucuacgagaccucccggnn

SEQ ID NO: 2003 - RNA, 21 nt, Artificial Sequence
  Description of Artificial Sequence: siNA antisense
  misc_feature (1)..(2): 2'-O-methyl
  misc_feature (3)..(5): 2'-deoxy-2'-fluoro
  misc_feature (6)..(6): 2'-O-methyl
  misc_feature (7)..(7): 2'-deoxy-2'-fluoro
  misc_feature (8)..(11): 2'-O-methyl
  misc_feature (12)..(17): 2'-deoxy-2'-fluoro
  misc_feature (18)..(19): 2'-O-methyl
  misc_feature (20)..(20): n is thymidine
  misc_feature (21)..(21): 3'-3 attached terminal deoxyabasic moiety
ggucuacgagaccucccggnn

SEQ ID NO: 2004 - RNA, 21 nt, Artificial Sequence
  Description of Artificial Sequence: siNA antisense
  misc_feature (1)..(2): 2'-O-methyl
  misc_feature (3)..(5): 2'-deoxy-2'-fluoro
  misc_feature (6)..(6): 2'-O-methyl
  misc_feature (7)..(7): 2'-deoxy-2'-fluoro
  misc_feature (8)..(11): 2'-O-methyl
  misc_feature (12)..(17): 2'-deoxy-2'-fluoro
  misc_feature (18)..(19): 2'-O-methyl
  misc_feature (20)..(21): n is thymidine
ggucuacgagaccucccggnn

SEQ ID NO: 2005 - RNA, 42 nt, Artificial Sequence
  Description of Artificial Sequence: siNA sense
  misc_feature (20)..(20): n is thymidine
  misc_feature (21)..(22): internucleotide hexethelyne glycol
  misc_feature (41)..(42): n is thymidine
ccgggaggucucguagaccnncugauagggugcuugcgagnn

SEQ ID NO: 2006 - RNA, 42 nt, Artificial Sequence
  Description of Artificial Sequence: siNA sense
  misc_feature (20)..(20): n is thymidine
  misc_feature (21)..(22): internucleotide hexethelyne glycol
  misc_feature (41)..(42): n is thymidine
cugauagggugcuugcgagnngcgaaaggccuugugguacnn

SEQ ID NO: 2007 - RNA, 42 nt, Artificial Sequence; identical to SEQ ID NO: 2005
  Description of Artificial Sequence: siNA sense
  misc_feature (1)..(1): 5'-3 attached deoxyabasic moiety
  misc_feature (1)..(2): 2'-deoxy-2'-fluoro
  misc_feature (3)..(8): 2'-deoxy
  misc_feature (9)..(12): 2'-deoxy-2'-fluoro
  misc_feature (13)..(13): 2'-deoxy
  misc_feature (14)..(14): 2'-deoxy-2'-fluoro
  misc_feature (15)..(17): 2'-deoxy
  misc_feature (18)..(19): 2'-deoxy-2'-fluoro
  misc_feature (20)..(20): n is thymidine
  misc_feature (21)..(22): internucleotide hexethelyne glycol
  misc_feature (22)..(23): 2'-deoxy-2'-fluoro
  misc_feature (24)..(25): 2'-deoxy
  misc_feature (27)..(27): 2'-deoxy-2'-fluoro
  misc_feature (27)..(31): 2'-deoxy
  misc_feature (32)..(32): 2'-deoxy-2'-fluoro
  misc_feature (33)..(33): 2'-deoxy
  misc_feature (34)..(36): 2'-deoxy-2'-fluoro
  misc_feature (37)..(37): 2'-deoxy
  misc_feature (38)..(38): 2'-deoxy-2'-fluoro
  misc_feature (39)..(41): 2'-deoxy
  misc_feature (42)..(42): 3'-3 attached deoxyabasic moiety

SEQ ID NO: 2008 - RNA, 42 nt, Artificial Sequence; identical to SEQ ID NO: 1978
  Description of Artificial Sequence: siNA sense
  misc_feature (1)..(1): 5'-3 attached deoxyabasic moiety
  misc_feature (1)..(2): 2'-deoxy-2'-fluoro
  misc_feature (3)..(8): 2'-deoxy
  misc_feature (9)..(12): 2'-deoxy-2'-fluoro
  misc_feature (13)..(13): 2'-deoxy
  misc_feature (14)..(14): 2'-deoxy-2'-fluoro
  misc_feature (15)..(17): 2'-deoxy
  misc_feature (18)..(19): 2'-deoxy-2'-fluoro
  misc_feature (20)..(20): n is thymidine
  misc_feature (21)..(22): internucleotide hexethelyne glycol
  misc_feature (22)..(22): 2'-deoxy
  misc_feature (23)..(23): 2'-deoxy-2'-fluoro
  misc_feature (24)..(29): 2'-deoxy
  misc_feature (31)..(34): 2'-deoxy-2'-fluoro
  misc_feature (34)..(34): 2'-deoxy
  misc_feature (36)..(36): 2'-deoxy-2'-fluoro
  misc_feature (36)..(37): 2'-deoxy
  misc_feature (39)..(39): 2'-deoxy-2'-fluoro
  misc_feature (39)..(39): 2'-deoxy
  misc_feature (41)..(41): 2'-deoxy-2'-fluoro
  misc_feature (42)..(42): 3'-3 attached deoxyabasic moiety

SEQ ID NO: 2009 - RNA, 42 nt, Artificial Sequence; identical to SEQ ID NO: 2006
  Description of Artificial Sequence: siNA sense
  misc_feature (1)..(1): 5'-3 attached deoxyabasic moiety
  misc_feature (1)..(2): 2'-deoxy-2'-fluoro
  misc_feature (3)..(4): 2'-deoxy
  misc_feature (5)..(5): 2'-deoxy-2'-fluoro
  misc_feature (6)..(9): 2'-deoxy
  misc_feature (10)..(10): 2'-deoxy-2'-fluoro
  misc_feature (11)..(11): 2'-deoxy
  misc_feature (12)..(14): 2'-deoxy-2'-fluoro
  misc_feature (15)..(15): 2'-deoxy
  misc_feature (16)..(16): 2'-deoxy-2'-fluoro
  misc_feature (17)..(19): 2'-deoxy
  misc_feature (20)..(20): n is thymidine
  misc_feature (21)..(22): internucleotide hexethelyne glycol
  misc_feature (22)..(22): 2'-deoxy
  misc_feature (23)..(23): 2'-deoxy-2'-fluoro
  misc_feature (24)..(29): 2'-deoxy
  misc_feature (30)..(33): 2'-deoxy-2'-fluoro
  misc_feature (34)..(34): 2'-deoxy
  misc_feature (35)..(35): 2'-deoxy-2'-fluoro
  misc_feature (36)..(37): 2'-deoxy
  misc_feature (38)..(38): 2'-deoxy-2'-fluoro
  misc_feature (39)..(39): 2'-deoxy
  misc_feature (40)..(40): 2'-deoxy-2'-fluoro
  misc_feature (41)..(41): n is thymidine
  misc_feature (42)..(42): 3'-3 attached deoxyabasic moiety

SEQ ID NO: 2010 - RNA, 21 nt, Artificial Sequence
  Description of Artificial Sequence:  siNA sense region
  misc_feature (1)..(1): optionally attached terminal abasic, inverted abasic, inverted nucleotide or other terminal cap moiety
  misc_feature (21)..(21): optionally attached terminal abasic, inverted abasic, inverted nucleotide or other terminal cap moiety
  misc_feature (1)..(19): n stands for any ribonucleotide
  misc_feature (20)..(21): n stands for any nucleotide
nnnnnnnnnnnnnnnnnnnnn

SEQ ID NO: 2011 - RNA, 21 nt, Artificial Sequence
  Description of Artificial Sequence:  siNA antisense region
  misc_feature (21)..(21): optionally attached terminal glyceryl, abasic, inverted abasic, inverted nucleotide or other terminal cap moiety
  misc_feature (20)..(21): Optional phosphorothioate or phosphorodithioate internucleotide linkage
  misc_feature (1)..(19): n stands for any ribonucleotide
  misc_feature (20)..(21): n stands for any nucleotide
nnnnnnnnnnnnnnnnnnnnn

SEQ ID NO: 2012 - RNA, 21 nt, Artificial Sequence
  Description of Artificial Sequence:  siNA sense region
  misc_feature (1)..(19): n stands for any nucleotide wherein any pyrimidine present is 2'-Fluoro and any purine is 2'-O-methyl
  misc_feature (20)..(21): n stands for any nucleotide
  misc_feature (20)..(21): Optional phosphorothioate or phosphorodithioate internucleotide linkage
nnnnnnnnnnnnnnnnnnnnn

SEQ ID NO: 2013 - RNA, 21 nt, Artificial Sequence
  Description of Artificial Sequence:  siNA antisense region
  misc_feature (1)..(19): n stands for any nucleotide wherein any pyrimidine is 2'-Fluoro and any purine is 2'-O-methyl
  misc_feature (20)..(21): n stands for any nucleotide
  misc_feature (20)..(21): Optional phosphorothioate or phosphorodithioate internucleotide linkage
  misc_feature (21)..(21): optionally attached terminal glyceryl, abasic, inverted abasic, inverted nucleotide or other terminal cap moiety
nnnnnnnnnnnnnnnnnnnnn

SEQ ID NO: 2014 - RNA, 21 nt, Artificial Sequence
  Description of Artificial Sequence:  siNA sense region
  misc_feature (1)..(19): n stands for any nucleotide wherein any pyrimidine is 2'-O-methyl or 2'-Fluoro
  misc_feature (20)..(21): n stands for any nucleotide
  misc_feature (1)..(1): optionally attached terminal abasic, inverted abasic, inverted nucleotide or other terminal cap moiety
  misc_feature (21)..(21): optionally attached terminal abasic, inverted abasic, inverted nucleotide or other terminal cap moiety
nnnnnnnnnnnnnnnnnnnnn

SEQ ID NO: 2015 - RNA, 21 nt, Artificial Sequence
  Description of Artificial Sequence:  siNA antisense region
  misc_feature (1)..(19): n stands for any nucleotide wherein any pyrimidine is 2'-Fluoro
  misc_feature (20)..(21): Optional phosphorothioate or phosphorodithioate internucleotide linkage
  misc_feature (20)..(21): n stands for any nucleotide
  misc_feature (21)..(21): optionally attached terminal glyceryl, abasic, inverted abasic, inverted nucleotide or other terminal cap moiety
nnnnnnnnnnnnnnnnnnnnn

SEQ ID NO: 2016 - RNA, 21 nt, Artificial Sequence
  Description of Artificial Sequence:  siNA sense region
  misc_feature (1)..(19): n stands for any nucleotide wherein any pyrimidine is 2'-Fluoro and any purine nucleotide present is 2'-Deoxy
  misc_feature (20)..(21): n stands for any nucleotide
  misc_feature (1)..(1): optionally attached terminal abasic, inverted abasic, inverted nucleotide or other terminal cap moiety
  misc_feature (21)..(21): optionally attached terminal abasic, inverted abasic, inverted nucleotide or other terminal cap moiety
nnnnnnnnnnnnnnnnnnnnn

SEQ ID NO: 2017 - RNA, 21 nt, Artificial Sequence
  Description of Artificial Sequence:  siNA sense region
  misc_feature (1)..(19): n stands for any nucleotide wherein any pyrimidine is 2'-Fluoro
  misc_feature (20)..(20): Optional phosphorothioate or phosphorodithioate internucleotide linkage
  misc_feature (20)..(21): n stands for any nucleotide
  misc_feature (1)..(1): optionally attached terminal abasic, inverted abasic, inverted nucleotide or other terminal cap moiety
  misc_feature (21)..(21): optionally attached terminal abasic, inverted abasic, inverted nucleotide or other terminal cap moiety
nnnnnnnnnnnnnnnnnnnnn

SEQ ID NO: 2018 - RNA, 21 nt, Artificial Sequence
  Description of Artificial Sequence:  siNA antisense region
  misc_feature (1)..(19): n stands for any nucleotide wherein any pyrimidine is 2'-Fluoro and any purine is 2'-deoxy
  misc_feature (20)..(21): n stands for any nucleotide
  misc_feature (21)..(21): optionally attached terminal glyceryl, abasic, inverted abasic, inverted nucleotide or other terminal cap moiety
nnnnnnnnnnnnnnnnnnnnn

SEQ ID NO: 2019 - RNA, 21 nt, Artificial Sequence
  Description of Artificial Sequence:  siNA sense region
  misc_feature (1)..(1): optionally attached terminal abasic, inverted abasic, inverted nucleotide or other terminal cap moiety
  misc_feature (21)..(21): optionally attached terminal abasic, inverted abasic, inverted nucleotide or other terminal cap moiety
  misc_feature (20)..(21): n stands for thymidine
gcgggccuugccuacuauunn

SEQ ID NO: 2020 - RNA, 21 nt, Artificial Sequence
  Description of Artificial Sequence:  siNA antisense region
  misc_feature (21)..(21): optionally attached terminal glyceryl, abasic, inverted abasic, inverted nucleotide or other terminal cap moiety
  misc_feature (20)..(21): Optional phosphorothioate or phosphorodithioate internucleotide linkage
  misc_feature (20)..(21): n stands for thymidine
aauaguaggcaaggcccgcnn

SEQ ID NO: 2021 - RNA, 21 nt, Artificial Sequence
  Description of Artificial Sequence:  siNA sense region
  misc_feature (20)..(21): n stands for thymidine
  misc_feature (20)..(21): Optional phosphorothioate or phosphorodithioate internucleotide linkage
  misc_feature (1)..(1): 2?-O-methyl
  misc_feature (3)..(5): 2?-O-methyl
  misc_feature (10)..(10): 2?-O-methyl
  misc_feature (14)..(14): 2?-O-methyl
  misc_feature (17)..(17): 2?-O-methyl
  misc_feature (2)..(2): 2?-deoxy-2?-fluoro
  misc_feature (6)..(9): 2?-deoxy-2?-fluoro
  misc_feature (11)..(13): 2?-deoxy-2?-fluoro
  misc_feature (15)..(16): 2?-deoxy-2?-fluoro
  misc_feature (18)..(19): 2?-deoxy-2?-fluoro
gcgggccuugccuacuauunn

SEQ ID NO: 2022 - RNA, 21 nt, Artificial Sequence
  Description of Artificial Sequence:  siNA antisense region
  misc_feature (20)..(21): n stands for thymidine
  misc_feature (20)..(21): Optional phosphorothioate or phosphorodithioate internucleotide linkage
  misc_feature (21)..(21): optionally attached terminal glyceryl, abasic, inverted abasic, inverted nucleotide or other terminal cap moiety
  misc_feature (3)..(3): 2?-deoxy-2?-fluoro
  misc_feature (6)..(6): 2?-deoxy-2?-fluoro
  misc_feature (10)..(10): 2?-deoxy-2?-fluoro
  misc_feature (15)..(17): 2?-deoxy-2?-fluoro
  misc_feature (19)..(19): 2?-deoxy-2?-fluoro
  misc_feature (1)..(2): 2?-O-methyl
  misc_feature (4)..(5): 2?-O-methyl
  misc_feature (7)..(9): 2?-O-methyl
  misc_feature (11)..(14): 2?-O-methyl
  misc_feature (18)..(18): 2?-O-methyl
aauaguaggcaaggcccgcnn

SEQ ID NO: 2023 - RNA, 21 nt, Artificial Sequence
  Description of Artificial Sequence:  siNA sense region
  misc_feature (20)..(21): n stands for thymidine
  misc_feature (1)..(1): optionally attached terminal abasic, inverted abasic, inverted nucleotide or other terminal cap moiety
  misc_feature (21)..(21): optionally attached terminal abasic, inverted abasic, inverted nucleotide or other terminal cap moiety
  misc_feature (2)..(2): 2'-O-methyl or 2'-Fluoro
  misc_feature (6)..(9): 2'-O-methyl or 2'-Fluoro
  misc_feature (11)..(13): 2'-O-methyl or 2'-Fluoro
  misc_feature (15)..(16): 2'-O-methyl or 2'-Fluoro
  misc_feature (18)..(19): 2'-O-methyl or 2'-Fluoro
aauaguaggcaaggcccgcnn

SEQ ID NO: 2024 - RNA, 21 nt, Artificial Sequence
  Description of Artificial Sequence:  siNA antisense region
  misc_feature (20)..(21): Optional phosphorothioate or phosphorodithioate internucleotide linkage
  misc_feature (20)..(21): n stands for thymidine
  misc_feature (21)..(21): optionally attached terminal glyceryl, abasic, inverted abasic, inverted nucleotide or other terminal cap moiety
  misc_feature (3)..(3): 2'deoxy-2?-Fluoro
  misc_feature (6)..(6): 2'-deoxy-2'-Fluoro
  misc_feature (10)..(10): 2'-deoxy-2'-Fluoro
  misc_feature (15)..(17): 2'-deoxy-2'-Fluoro
  misc_feature (19)..(19): 2'-deoxy-2'-Fluoro
aauaguaggcaaggcccgcnn

SEQ ID NO: 2025 - RNA, 21 nt, Artificial Sequence
  Description of Artificial Sequence:  siNA sense region
  misc_feature (1)..(19): n stands for any nucleotide wherein any pyrimidine is 2'-Fluoro and any purine nucleotide present is 2'-Deoxy
  misc_feature (20)..(21): n stands for thymidine
  misc_feature (1)..(1): optionally attached terminal abasic, inverted abasic, inverted nucleotide or other terminal cap moiety
  misc_feature (21)..(21): optionally attached terminal abasic, inverted abasic, inverted nucleotide or other terminal cap moiety
  misc_feature (1)..(1): 2'-deoxy
  misc_feature (3)..(5): 2'-deoxy
  misc_feature (10)..(10): 2'-deoxy
  misc_feature (14)..(14): 2'-deoxy
  misc_feature (17)..(17): 2'-deoxy
  misc_feature (2)..(2): 2'-deoxy-2'-Fluoro
  misc_feature (6)..(9): 2'-deoxy-2'-Fluoro
  misc_feature (11)..(13): 2'-deoxy-2'-Fluoro
  misc_feature (15)..(16): 2'-deoxy-2'-Fluoro
  misc_feature (18)..(19): 2'-deoxy-2'-Fluoro
aauaguaggcaaggcccgcnn

SEQ ID NO: 2026 - RNA, 21 nt, Artificial Sequence
  Description of Artificial Sequence:  siNA sense region
  misc_feature (20)..(20): Optional phosphorothioate or phosphorodithioate internucleotide linkage
  misc_feature (20)..(21): n stands for thymidine
  misc_feature (1)..(1): optionally attached terminal abasic, inverted abasic, inverted nucleotide or other terminal cap moiety
  misc_feature (2)..(2): 2?-deoxy-2'-Fluoro
  misc_feature (6)..(9): 2?-deoxy-2'-Fluoro
  misc_feature (11)..(13): 2?-deoxy-2'-Fluoro
  misc_feature (15)..(16): 2?-deoxy-2'-Fluoro
  misc_feature (18)..(19): 2?-deoxy-2'-Fluoro
  misc_feature (21)..(21): optionally attached terminal abasic, inverted abasic, inverted nucleotide or other terminal cap moiety
aauaguaggcaaggcccgcnn

SEQ ID NO: 2027 - RNA, 21 nt, Artificial Sequence
  Description of Artificial Sequence:  siNA antisense region
  misc_feature (20)..(21): n stands for any thymidine
  misc_feature (21)..(21): optionally attached terminal glyceryl, abasic, inverted abasic, inverted nucleotide or other terminal cap moiety
  misc_feature (1)..(2): 2?-deoxy
  misc_feature (4)..(5): 2?-deoxy
  misc_feature (7)..(9): 2?-deoxy
  misc_feature (11)..(14): 2?-deoxy
  misc_feature (18)..(18): 2?-deoxy
  misc_feature (3)..(3): 2?-deoxy-2'-Fluoro
  misc_feature (6)..(6): 2?-deoxy-2'-Fluoro
  misc_feature (10)..(10): 2?-deoxy-2'-Fluoro
  misc_feature (15)..(17): 2?-deoxy-2'-Fluoro
  misc_feature (19)..(19): 2?-deoxy-2'-Fluoro
aauaguaggcaaggcccgcnn

SEQ ID NO: 2028 - RNA, 14 nt, Artificial Sequence
  Description of Artificial Sequence:  Target Sequence
auauaucuauuucg

SEQ ID NO: 2029 - RNA, 14 nt, Artificial Sequence
  Description of Artificial Sequence:  Complement to Target Sequence
cgaaauaguauaua

SEQ ID NO: 2030 - RNA, 22 nt, Artificial Sequence
  Description of Artificial Sequence:  appended target/complement
cgaaauaguauauacuauuucg

SEQ ID NO: 2031 - RNA, 24 nt, Artificial Sequence
  Description of Artificial Sequence:  Duplex forming oligonucleotide
  misc_feature (23)..(24): n stands for thymidine
cgaaauaguauauacuauuucgnn
